(19) United States
(12) Patent Application Publication
(10) Pub. No.: US 2023/0140035 A1
(43) Pub. Date: May 4, 2023

(54) ANTIBODIES THAT BIND TUMOR TISSUE FOR DIAGNOSIS AND THERAPY

(71) Applicant: Atreca, Inc., San Carlos, CA (US)

(72) Inventors: Jeff DeFalco, San Carlos, CA (US); Daniel Eric Emerling, San Carlos, CA (US); Jessica Finn, San Carlos, CA (US); Norman Michael Greenberg, San Carlos, CA (US); Vera Huang, San Carlos, CA (US); Shaun M. Lippow, San Carlos, CA (US); Fengling Liu, San Carlos, CA (US); Amy Manning-Bog, San Carlos, CA (US); William H. Robinson, San Carlos, CA (US); Alexander Scholz, San Carlos, CA (US); Tito Serafini, San Carlos, CA (US); Nikhil Vad, San Carlos, CA (US); Wayne Volkmuth, San Carlos, CA (US); Yann Chong TAN, San Carlos, CA (US)

(21) Appl. No.: 17/935,152

(22) Filed: Sep. 26, 2022

Related U.S. Application Data
(62) Division of application No. 16/792,115, filed on Feb. 14, 2020, now Pat. No. 11,472,885.
(60) Provisional application No. 62/806,285, filed on Feb. 15, 2019.
(60) Provisional application No. 62/806,310, filed on Feb. 15, 2019.
(60) Provisional application No. 62/843,298, filed on May 3, 2019.
(60) Provisional application No. 62/843,751, filed on May 6, 2019.
(60) Provisional application No. 62/852,830, filed on May 24, 2019.
(60) Provisional application No. 62/927,501, filed on Oct. 29, 2019.

(51) Int. Cl. C07K 16/30; A61P 35/00; A61K 39/395; G01N 33/68

(52) U.S. Cl. CPC C07K 16/30; A61P 35/00; A61K 39/3955; A61K 39/39558; G01N 33/6854; A61K 2039/507

(57) ABSTRACT

Provided herein are antibodies that bind to tumor tissue through a binding interaction with an extracellular RNA-protein complex. Such antibodies are used in methods of inducing an immune response and methods of inhibiting tumor cell growth. Additionally provided are methods of producing such antibodies.

### CROSS-REFERENCE TO RELATED APPLICATIONS

[0001] This application is a Divisional of U.S. patent application Ser. No. 16/792,115, filed Feb. 14, 2020, which claims priority benefit of U.S. Provisional Application No. 62/806,285 filed Feb. 15, 2019; U.S. Provisional Application No. 62/806,310, filed Feb. 15, 2019; U.S. Provisional Application No. 62/843,298, filed May 3, 2019; U.S. Provisional Application No. 62/843,751, filed May 6, 2019; U.S. Provisional Application No. 62/852,830, filed May 24, 2019; and U.S. Provisional Application No. 62/927,501, filed Oct. 29, 2019, each of which is incorporated by reference in their entirety for all purposes.

### SEQUENCE LISTING

[0002] The instant application contains a Sequence Listing that has been submitted electronically in XML format and is hereby incorporated by reference in its entirety. Said XML copy, created on Sep. 14, 2022, is named 097519-1341052-1861US.xml and is 2 MB in size.

### BACKGROUND OF THE INVENTION

[0003] Therapeutic antibodies for the treatment of various cancers have had a dramatic impact on patient remission and survival. However, there continues to be a need for alternative oncology therapeutics, e.g., for treating patients who do not respond well to a therapy and/or become resistant to the therapy.

### BRIEF SUMMARY OF THE INVENTION

[0004] In one aspect, provided herein is an isolated antibody that binds to tumor tissues, wherein the antibody binds to an extracellular RNA-protein complex comprising polyadenylated RNA. In some embodiments, the extracellular RNA-protein complex further comprises rRNA. In some embodiments, the extracellular RNA-protein complex comprises mRNA. In some embodiments, the extracellular RNA-protein complex comprises one or more polyadenylated RNA binding proteins. In some embodiments, the extracellular RNA-protein complex further comprises a ribosomal protein. In some embodiments, the extracellular RNA-protein complex comprises an mRNA binding protein. In some embodiments, the extracellular RNA-protein complex comprises a poly(A)+ binding protein. In some embodiments, the extracellular RNA-protein complex comprises a polyadenylate binding protein family member. In some embodiments, the extracellular RNA-protein complex comprises a polyadenylate binding protein cytoplasmic (PABPC) family member. In some embodiments, the PABPC family member is PABPC 1 (PABPC1), PABPC 3 (PABPC3), or PABPC 4 (PABPC4). In some embodiments, the PABPC family member is PABPC1. In some embodiments, the extracellular RNA-protein complex comprises MOV10. In some embodiments, the extracellular RNA-protein complex comprises a biomolecular condensate. In some embodiments, the biomolecular condensate is induced by stress. In some embodiments, the biomolecular condensate is induced by hypoxia and/or a chemotherapeutic drug. In some embodiments, the antibody induces cellular signaling by binding to Fc□Rs. In some embodiments, the antibody comprises an Fc region that binds to Fc□RIIa. In some embodiments, the antibody has an EC₅₀ of 500 nM or lower in an Fc□RIIa engagement assay. In some embodiments, the Fc□RIIa engagement assay employs EMT6 tumor cells passaged in vivo.

[0005] In an additional aspect, provided herein is an antibody that binds to an extracellular RNA-protein complex and wherein the antibody comprises:

(a) a heavy chain variable region comprising:
(i) an HCDR1 of any one of SEQ ID NOS:1-8 or 169-362, or a variant thereof in which 1, 2, 3, 4, or 5 amino acids are substituted relative to the sequence;
(ii) an HCDR2 of any one of SEQ ID NOS:9-19 or 363-556, or a variant thereof in which 1, 2, 3, 4, or 5 amino acids are substituted relative to the sequence; and
(iii) an HCDR3 of any one of SEQ ID NOS:20-47, 557-750, or 1727 or a variant thereof in which 1, 2, 3, 4, 5, 6, 7, 8, 9, or 10 amino acids are substituted relative to the sequence;
(b) a light chain variable region comprising:
(i) an LCDR1 of any one of SEQ ID NOS:48-58 or 751-944 or 1741, or a variant thereof in which 1, 2, 3, 4, or 5 amino acids are substituted relative to the sequence;
(ii) an LCDR2 of any one of SEQ ID NOS:59-67 or 945-1138, or a variant thereof in which 1, 2, or 3 amino acids are substituted relative to the sequence; and
(iii) an LCDR3 of any one of SEQ ID NOS:68-76 or 1139-1332, or a variant thereof in which 1, 2, 3, 4, or 5 amino acids are substituted relative to the sequence. In some embodiments, at least 1 or 2 of the substitutions are conservative substitutions; at least 50% of the substitutions are conservative substitutions; or all of the substitutions are conservative substitutions.

[0006] In some embodiments, the substitutions in each of the CDRs provides an HCDR1, HCDR2, HCDR3, LCDR1, LCDR2, LCDR3 comprising an amino acid sequence that complies with the following formula:

(a) an HCDR1 sequence G(F/Y)X₃X₄(A/S)X₆A(W/Y)X₉(S/T), wherein X₃ is D, T or V; X₄ is A, F, or Y; X₆ is A, H, K, M, N or R; and X₉ is F, M, or Y;
(b) an HCDR2 sequence (F/R)I(K/Q)(A/S)X₅X₆X₇(A/G)X₉X₁₀T(D/E)(A/S)(P/S)(K/Q), wherein X₅ is A, N, T, or V; X₆ is D, H, Q, S or T; X7 is D, E, or N; X₉ is E, G, H, K or Q; and X₁₀ is A, I, Q or T; and
(c) an HCDR3 sequence (I/T)(S/T)X₃(F/Y)X₅CX₇(G/S)X₉X₁₀CX₁₂X₁₃X₁₄(D/E)X₁₆SX₁₈X₁₉X₂₀X₂₁X₂₂X₂₃X₂₄X₂₅(F/Y) (F/Y)X₂₈X₂₉(D/N)X₃₁, wherein X₃ is A, P, S, or T; X₅ is A, C, or S; X₇ is H, L, Q, or R; X₉ is A, G, K, or N; X₁₀ is A, N, Q, R, or S; X₁₂ is A, L, or P; X₁₃ is A, N, or S; X₁₄ is H, Q, R, or S; X₁₆ is N, Q, or T; X₁₈ is F, M, or Y; X₁₉ is C, S, or V; X₂₀ is A, G, or N; X₂₁ is A, G, or N; X₂₂ is Q, S, or Y; X₂₃ is D, F, N, S, or Y; X₂₄ is A, K, N, P, Q, or S; X₂₅ is D, K, Q, R, or S; X₂₈ is F, L, W, or Y; X₂₉ is F, M, or V; and X₃₁ is I, P, or V;
(d) an LCDR1 sequence X₁G(A/S)X₄(S/T)(D/N)I(G/Q)(H/S)X₁₀X₁₁(T/V)X₁₃, wherein X₁ is H, S, or T; X₄ is E, K, P, or S; X₁₀ is A, H, N, S, or T; X₁₁ is A, D, S, T, or Y; and X₁₃ is A, L, S, T or Y;
(e) an LCDR2 sequence X₁(D/N)X₃X₄(Q/R)(A/P)X₇, wherein X₁ is A, H, K, M, N, or R; X₃ is N, S, or T; X₄ is A, L, Q, or Y; and X₇ is L, Q, S, or Y; and
(f) an LCDR3 sequence (A/S)(S/T)(F/W)(D/N)X₅X₆X₇X₈(I/V)X₁₀(I/V), wherein X₅ is D, E, or N; X₆ is A, D, Q, or S; X₇ is L, N, or S; X₈ is L, N, S, or T; and X₁₀ is H, K, Q, R, or W.

[0007] In some embodiments, the antibody comprises a V_{H} region that comprises an HCDR1 comprising a sequence of any one of SEQ ID NOS:1-8 or 169-362, an HCDR2 comprising a sequence of any one of SEQ ID NOS:9-19 or 363-556, an HCDR3 comprising a sequence of any one of SEQ ID NOS:20-47 or 557-750 or 1727; an LCDR1 comprising a sequence of any one of SEQ ID NOS:48-58 or 751-944 or 1741, an LCDR2 comprising a sequence of any one of SEQ ID NOS:59-67 or 945-1138, and an LCDR3 comprising a sequence of any one of SEQ ID NOS:68-76 or 1139-1332, in which 1 or 2 amino acids are substituted in at least one of the HCDR1, HCDR2, HCDR3, LCDR1, LCDR2, and LCDR3.

[0008] In some embodiments, the antibody comprises a V_{H} region comprising an HCDR1, HCDR2, and HCDR3 of a V_{H} region of any one of SEQ ID NOS:77-122 or 1333-1526 or 1725; or a V_{L} region comprising an LCDR1, LCDR2, LCDR3 of any one of SEQ ID NOS:123-168 or 1527-1720 or 1726.

[0009] In some embodiments, the antibody comprises a V_{H} region comprising the HCDR1, the HCDR2, and the HCDR3 of an antibody set forth in a V_{H} region of any one of SEQ ID NOS:77-122 and 1333-1526 or 1725; and a V_{L} region comprising the LCDR1, LCDR2, and LCDR3 of the corresponding light chain of any one of SEQ ID NOS:123-168 or 1527-1720 or 1726. In some embodiments, the substitutions in each of the CDRs provides a HCDR1, HCDR2, HCDR3, LCDR1, LCDR2, LCDR3 comprising an amino acid sequence that complies with the following formula:

(a) an HCDR1 sequence G(F/Y)X₃X₄(A/S)X₆A(W/Y)(F/M)(S/T), wherein X₃ is D, T or V; X₄ is A, F, or Y; and X₆ is A, H, K, M, or N;
(b) an HCDR2 sequence RIK(A/S)X₅X₆(D/N)(A/G)X₉X₁₀(D/E)(A/S)(P/S)(K/Q), wherein X₅ is A, N, T, or V; X₆ is D, H, Q, S or T; X₉ is E, G, H, K or Q; and X₁₀ is A, I, Q, or T;
(c) an HCDR3 sequence (I/T)(S/T)X₃(F/Y)CCX₇(G/S)X₉X₁₀CX₁₂(N/S)X₁₄(D/E)TS(F/Y)CX₂₀(G/N)X₂₂X₂₃X₂₄, X₂₅(F/Y)Y X₂₈X₂₉(D/N)X₃₁ (SEQ ID NO: 1744), wherein X₃ is A, P, or S; X₇ is H, L, Q, or R; X₉ is A, G, K, or N; X₁₀ is A, N, Q, R, or S; X₁₂ is A, L, or P; X₁₄ is H, Q, R, or S; X₂₀ is A, G, or N; X₂₂ is Q, S, or Y; X₂₃ is D, F, N, or Y; X₂₄ is A, K, N, P, or Q; X₂₅ is D, Q, R, or S; X₂₈ is F, L, W, or Y; X₂₉ is F, M, or V; and X₃₁ is I, P, or V;
(d) an LCDR1 sequence (S/T)G(A/S)X₄(S/T)(D/N)IG(H/S)X₁₀X₁₁(T/V)X₁₃, wherein X₄ is K, P, or S, X₁₀ is A, N, S, or T; X₁₁ is A, S, T, or Y; and X₁₃ is A, S, T or Y;
(e) an LCDR2 sequence X₁(D/N)X₃X₄(Q/R)(A/P)X₇, wherein X₁ is A, H, K, M, N, or R; X₃ is N, S, or T; X₄ is A, L, Q, or Y, and X₇ is L, Q, S, or Y; and
(f) an LCDR3 sequence (A/S)(S/T)W(D/N)X₅X₆X₇X₈(I/V)X₁₀(I/V), wherein X₅ is D, E, or N, X₆ is A, D, Q, or S, X₇ is L, N, or S; X8 is L, N, S, or T; and X₁₀ is H, K, Q, or R.

[0010] In some embodiments, the antibody comprises an HCDR1, HCDR2, HCDR3, LCDR1, LCDR2, and LCDR3 of an antibody designated as AIP-192482, AIP-171142, AIP-165430, AIP-189526, AIP-122563, AIP-158623, AIP-155066, AIP-166120, AIP-133645, AIP-187893, AIP-142079, AIP-160470, AIP-102396, AIP-150055, AIP-167084, AIP-185304, AIP-134770, AIP-141887, AIP-196203, AIP-128195, AIP-116579, AIP-192329, AIP-197809, AIP-142489, AIP-167726, AIP-199834, AIP-143179, AIP-195587, AIP-153462, AIP-115363, AIP-151090, AIP-168083, AIP-161082, AIP-114196, AIP-189338, AIP-183190, AIP-110143, AIP-147176, AIP-134312, AIP-128243, AIP-156172, AIP-147389, AIP-124314, AIP-185291, AIP-135247, AIP-113513, AIP-102299, AIP-179097, AIP-109343, AIP-119622, AIP-191735, AIP-157078, AIP-153475, AIP-133650, AIP-190915, AIP-167400, AIP-109729, AIP-151709, AIP-136628, AIP-101601, AIP-146871, AIP-170053, AIP-199483, AIP-162041, AIP-180675, AIP-183133, AIP-191470, AIP-151167, AIP-106633, AIP-102624, AIP-109484, AIP-126080, AIP-161571, AIP-163039, AIP-101235, AIP-182061, AIP-181246, AIP-192216, AIP-171912, AIP-172872, AIP-167833, AIP-190051, AIP-145518, AIP-167533, AIP-112580, AIP-143155, AIP-119664, AIP-190526, AIP-114403, AIP-156760, AIP-103803, AIP-195588, AIP-145722, AIP-178251, AIP-116142, AIP-183350, AIP-127108, AIP-128147, AIP-109510, AIP-104086, AIP-143132, AIP-170105, AIP-169636, AIP-152243, AIP-138776, AIP-103817, AIP-130491, AIP-188155, AIP-167246, AIP-106139, AIP-198351, AIP-159326, AIP-192275, AIP-190761, AIP-166832, AIP-148062, AIP-129145, AIP-111240, AIP-153888, AIP-130915, AIP-109048, AIP-170569, AIP-154873, AIP-159037, AIP-186826, AIP-156514, AIP-157122, AIP-173276, AIP-150485, AIP-166847, AIP-124013, AIP-126285, AIP-168605, AIP-190274, AIP-136060, AIP-180422, AIP-166722, AIP-127782, AIP-189473, AIP-192571, AIP-112328, AIP-125258, AIP-150199, AIP-125062, AIP-177193, AIP-115388, AIP-107759, AIP-170221, AIP-143369, AIP-189475, AIP-102833, AIP-157045, AIP-175775, AIP-154181, AIP-125984, AIP-160829, AIP-184744, AIP-128136, AIP-181273, AIP-153125, or AIP-131972 in Table Table 1A or Table 2A, or a variant thereof in which at least one, two, three, four, five, or all six of the CDRs contain 1 or 2 amino acid substitutions compared to the corresponding CDR sequence shown in Table 1B or Table 2B.

[0011] In some embodiments, the antibody comprises an HCDR1, HCDR2, HCDR3, LCDR1, LCDR2, and LCDR3 of an antibody designated as AIP-192482, AIP-171142, AIP-165430, AIP-189526, AIP-122563, AIP-158623, AIP-155066, AIP-166120, AIP-133645, AIP-187893, AIP-142079, AIP-160470, AIP-102396, AIP-150055, AIP-167084, AIP-185304, AIP-134770, AIP-141887, AIP-196203, AIP-128195, AIP-116579, AIP-192329, AIP-197809, AIP-142489, AIP-167726, AIP-199834, AIP-143179, AIP-195587, AIP-153462, AIP-115363, AIP-151090, AIP-168083, AIP-161082, AIP-114196, AIP-189338, AIP-183190, AIP-110143, AIP-147176, AIP-134312, AIP-128243, AIP-156172, AIP-147389, AIP-124314, AIP-185291, AIP-135247, AIP-113513, AIP-102299, AIP-179097, AIP-109343, AIP-119622, AIP-191735, AIP-157078, AIP-153475, AIP-133650, AIP-190915, AIP-167400, AIP-109729, AIP-151709, AIP-136628, AIP-101601, AIP-146871, AIP-170053, AIP-199483, AIP-162041, AIP-180675, AIP-183133, AIP-191470, AIP-151167, AIP-106633, AIP-102624, AIP-109484, AIP-126080, AIP-161571, AIP-163039, AIP-101235, AIP-182061, AIP-181246, AIP-192216, AIP-171912, AIP-172872, AIP-167833, AIP-190051, AIP-145518, AIP-167533, AIP-112580, AIP-143155, AIP-119664, AIP-190526, AIP-114403, AIP-156760, AIP-103803, AIP-195588, AIP-145722, AIP-178251, AIP-116142, AIP-183350, AIP-127108, AIP-128147, AIP-109510, AIP-104086, AIP-143132, AIP-170105, AIP-169636, AIP-152243, AIP-138776, AIP-103817, AIP-130491, AIP-188155, AIP-167246, AIP-106139, AIP-198351, AIP-159326, AIP-192275, AIP-190761, AIP-166832, AIP-148062, AIP-129145, AIP-111240, AIP-153888, AIP-130915, AIP-109048, AIP-170569, AIP-154873, AIP-159037, AIP-186826, AIP-156514, AIP-157122, AIP-173276, AIP-150485, AIP-166847, AIP-124013, AIP-126285, AIP-168605, AIP-190274, AIP-136060, AIP-180422, AIP-166722, AIP-127782, AIP-189473, AIP-192571, AIP-112328, AIP-125258, AIP-150199, AIP-125062, AIP-177193, AIP-115388, AIP-107759, AIP-170221, AIP-143369, AIP-189475, AIP-102833, AIP-157045, AIP-175775, AIP-154181, AIP-125984, AIP-160829, AIP-184744, AIP-128136, AIP-181273, AIP-153125, or AIP-131972 in Table 1B or Table 2B.

[0012] In a further aspect, provided herein is an antibody that binds to an extracellular RNA-protein complex and wherein the antibody comprises:

(a) a heavy chain variable region comprising:
(i) an HCDR1 having the sequence GF(T/V)(F/Y)(S/A)X₆AWM(S/T) (SEQ ID NO:1728), wherein X₆ is K, A, or M;
(ii) an HCDR2 having the sequence of RIK(S/A)X₅X₆(D/E)(G/A)X₉X₁₀T(D/E)YAA(P/S)VKG (SEQ ID NO:1729), wherein X₅ is V, N, A, or T; X₆ is T, Q, S, D, or H; X₉ is E, H, K, or G; and X₁₀ is T, Q, or I;
(iii) an HCDR3 having the sequence of (I/T)(S/T)SFCC(H/R)(G/S)X₉X₁₀CPSX₁₄(D/E)TS(F/Y)CX₂₀(G/N)X₂₂X₂₃X₂₄X₂₅ (F/Y)Y(F/Y)(M/V)(D/N)X₃₁ (SEQ ID NO:1730), wherein X₉ is A, G, K, or N; X₁₀ is N, Q, R, or S; X₁₄ is H, R, or S; X₂₀ is A, G, or N; X₂₂ is Q, S, or Y; X₂₃ is D, F, N, or Y; X₂₄ is A, K, N, P, or S; X₂₅ is D, Q, R, or S; X₁₉ is D or N; and X₃₁ is I, P, or V;
(b) a light chain variable region comprising:
(i) an LCDR1 having the sequence of SG(S/A)X₄(S/T)(N/D)IGSSX₁₁VX₁₃ (SEQ ID NO:1731), wherein X₄ is S, P, or K; X₁₁ is S, Y, or T; and X₁₃ is S, Y, or T;
(ii) an LCDR2 having the sequence of (K/M)(N/D)X₃X₄R(P/A)X₇, wherein X₃ is S, N or T; X₄ is L, Q, or A; X₅ is P or A; X₇ is Q, S, Y, or L; and
(iii) an LCDR3 having the sequence of (S/A)(T/S)W(D/N)X₅X₆(L/N)X₈(V/I)R(V/I), wherein X₅ is E, D or N; X₆ is S, A, or Q; and X₈ is N, S or T. In some embodiments, in the HCDR1 sequence, position 3 is T; position 4 is F; position 5 is S; position 6 is K; and/or position 10 is S. In some embodiments, the HCDR1 sequence comprises a sequence GFTFSKAWMS (SEQ ID NO:1). In some embodiments, the HCDR1 comprises a sequence of any one of GFTFSAAWMS (SEQ ID NO:4), GFVFSKAWMS (SEQ ID NO:7), GFTFAKAWMS (SEQ ID NO:6), GFTYSKAWMS (SEQ ID NO:5), GFTFSMAWMS (SEQ ID NO:3), GFTYSAAWMS (SEQ ID NO:2), or GFTFSKAWMT (SEQ ID NO:8). In some embodiments, in the HCDR2 sequence, position 4 is S; position 5 is V; position 6 is T; position 7 is D; position 8 is G; position 9 is E; position 10 is T; position 12 is D; and/or position 16 is P. In some embodiments, the HCDR2 comprises a sequence RIKSVTDGETTDYAAPVKG (SEQ ID NO:9). In some embodiments, the HCDR2 comprises a sequence RIKSVTDGEQTDYAAPVKG (SEQ ID NO:18), RIKAADDGKQTDYAAPVKG (SEQ ID NO:19), RIKSVTDGETTEYAASVKG (SEQ ID NO: 504), RIKAVHDGETTDYAAPVKG (SEQ ID NO:10), RIKSNTDAETTDYAAPVKG (SEQ ID NO:11), RIKSVQDGETTDYAAPVKG (SEQ ID NO:12), RIKSVTDGHTTDYAAPVKG (SEQ ID NO:13), RIKSVTDGGITDYAAPVKG (SEQ ID NO:14), RIKSTSDGETTDYAAPVKG (SEQ ID NO:15), RIKSTSDGGITDYAAPVKG (SEQ ID NO:16), or RIKSVTEGETTDYAAPVKG (SEQ ID NO:17). In some embodiments, in the HCDR3 sequence, position 1 is T; position 2 is S; position 7 is R; position 8 is G; position 9 is G; position 10 is S; position 14 is H; position 15 is D; position 18 is Y; position 20 is G; and/or position 21 is G. In some embodiments, the HCDR3 comprises a sequence TSSFCCRGGSCPSHDTSYCGGYYKSYYYMDV (SEQ ID NO:33), TSSFCCRGGSCPSHDTSYCGGQYKSYYYMDV (SEQ ID NO:21), or TSSFCCRGGSCPSHDTSYCGGQYKSFYYMDV (SEQ ID NO:28). In some embodiments, the HCDR3 comprises a sequence:

(SEQ ID NO: 32)
TSSFCCRGGSCPSSDTSYCGGQYKSYYFMDV,
(SEQ ID NO: 30)
ISSFCCRGGSCPSRDTSYCGGQYKSYYFMDV,
(SEQ ID NO: 29)
ISSFCCRGNSCPSSDTSYCNGQYKSYYFMDV,
(SEQ ID NO: 27)
ISSFCCRGNSCPSSDTSYCNGQYKSYYYMDV,
(SEQ ID NO: 26)
ISSFCCHSNNCPSSDTSYCNGYYKQYYFMDV,
(SEQ ID NO: 25)
ISSFCCRGKQCPSSDTSYCGGQFKSYYFMDV,
(SEQ ID NO: 24)
ISSFCCRGKQCPSSDTSYCNGYYADYYFMDV,
(SEQ ID NO: 23)
TSSFCCRGNQCPSSDTSYCGGQYPSYYYMDP,
(SEQ ID NO: 22)
TTSFCCRGASCPSSDTSYCAGSYKSYYFVNI,
(SEQ ID NO: 20)
TSSFCCRSGSCPSSDTSYCNGQYKSYYYMDV,
(SEQ ID NO: 42)
TSSFCCRGGSCPSHDTSYCGGQDSRYYYMDV,
(SEQ ID NO: 41)
TSSFCCRGGSCPSHDTSFCGGSYKSYYYMDV,
(SEQ ID NO: 37)
TSSFCCRGGSCPSHDTSFCGGQYKSYYYMDV,
(SEQ ID NO: 40)
TSSFCCRGGSCPSHDTSFCGGQDSRYYYMDV,
(SEQ ID NO: 39)
TTSFCCRGGSCPSHDTSFCGGQYKSYYYMDV,
(SEQ ID NO: 34)
TSSFCCRGGSCPSHDTSFCGGQDKRYYYMDV,
(SEQ ID NO: 38)
TTSFCCRGGRCPSRDTSFCGGQYNSYYYMDV,
(SEQ ID NO: 36)
TSSFCCRGGSCPSHDTSFCGGQYNRYYYMDV,
and
(SEQ ID NO: 35)
TTSFCCRGGSCPSHDTSFCGGQDKRYYYMDV.

In some embodiments, in the LCDR1 sequence, position 3 is S; position 4 is S; position 5 is S; position 6 is N; position 11 is S; and/or position 13 is S. In some embodiments, the LCDR1 comprises a sequence SGSSSNIGSSSVS (SEQ ID NO:48). In some embodiments, the LCDR1 comprises the sequence SGSKSNIGSSYVS (SEQ ID NO:50), SGSSSNIGSSSVY (SEQ ID NO:56), SGSKSNIGSSSVY (SEQ ID NO:55), SGSSTNIGSSSVS (SEQ ID NO:54), SGASSNIGSSSVS (SEQ ID NO:52), SGSSTNIGSSTVS (SEQ ID NO:53), SGSKSNIGSSSVS (SEQ ID NO:51), or SGSSTNIGSSSVT (SEQ ID NO:49). In some embodiments, in the LCDR2 sequence, position 1 is K; position 2 is N; position 3 is N; position 4 is Q; position 6 is P; and/or position 7 is S. In some embodiments, the LCDR2 sequence comprises a sequence KNNQRPS (SEQ ID NO:59). In some embodiments, the LCDR2 comprises a sequence KNNQRPY (SEQ ID NO:66), KDNQRPS (SEQ ID NO:62), KNTQRPS (SEQ ID NO:65), KNNARPY (SEQ ID NO:64), KNTQRAS (SEQ ID NO:63), MNNQRPY (SEQ ID NO:61), or KDNQRPL (SEQ ID NO:60). In some embodiments, in the LCDR3 sequence, position 1 is S; position 2 is T; position 4 is D; position 5 is D; position 6 is S; position 7 is L; position 8 is S; position 9 is V; and/or position 11 is V. In some embodiments, the LCDR3 sequence comprises a sequence STWDDSLSVRV (SEQ ID NO:68). In some embodiments, the LCDR3 sequence comprises a sequence STWDDALSVRV (SEQ ID NO:72), SSWDDSNSVRI (SEQ ID NO:71), ATWDDQLSVRV (SEQ ID NO:69), ATWDDSLTVRI (SEQ ID NO:76), ATWDNSLSIRV (SEQ ID NO:70), or STWDESLSVRV (SEQ ID NO:73).

[0013] In some embodiments, the HCDR1 has a sequence GFTFSKAWMS (SEQ ID NO:1), GFTFSAAWMS (SEQ ID NO:4), or GFTFSKAWMT (SEQ ID NO:8); the HCDR2 has a sequence RIKSVTDGETTDYAAPVKG (SEQ ID NO:9) or RIKSTSDGETTDYAAPVKG (SEQ ID NO:15); the HCDR3 has a sequence

(SEQ ID NO: 32)
TSSFCCRGGSCPSSDTSYCGGQYKSYYFMDV,
(SEQ ID NO: 20)
TSSFCCRSGSCPSSDTSYCNGQYKSYYYMDV,
(SEQ ID NO: 23)
TSSFCCRGNQCPSSDTSYCGGQYPSYYYMDP,
(SEQ ID NO: 30)
ISSFCCRGGSCPSRDTSYCGGQYKSYYFMDV,
(SEQ ID NO: 27)
ISSFCCRGNSCPSSDTSYCNGQYKSYYYMDV,
(SEQ ID NO: 21)
TSSFCCRGGSCPSHDTSYCGGQYKSYYYMDV,
or
(SEQ ID NO: 34)
TSSFCCRGGSCPSHDTSFCGGQDKRYYYMDV;

the LCDR1 has a sequence SGSSSNIGSSSVY (SEQ ID NO:56), SGSSSNIGSSSVS (SEQ ID NO:48), SGSSTNIGSSSVS (SEQ ID NO:54), or SGSKSNIGSSSVS (SEQ ID NO:51);
the LCDR2 has a sequence KNNQRPS (SEQ ID NO:59) or KDNQRPS (SEQ ID NO:62); and
the LCDR3 has a sequence STWDDALSVRV (SEQ ID NO:72), STWDDSLSVRV (SEQ ID NO:68), SSWDDSNSVRI (SEQ ID NO:71), or ATWDNSLSIRV (SEQ ID NO:70)

[0014] In some embodiments, the heavy chain variable region has a sequence having at least 90% identity to the sequence of any one of

(SEQ ID NO: 92)
EVQLVESGGALVKPGGSLRLSCAASGFTFSKAWMSWVRQAPGKGLEWVGR
IKSVTDGETTDYAAPVKGRFTISRDDSKSTLYLQMNSLKTEDTAVYYCTS
SFCCRGGSCPSSDTSYCGGQYKSYYFMDVWGKGTTVTVSS,
(SEQ ID NO: 77)
EVQLVESGGALVKPGGSLRLSCAASGFTFSKAWMSWVRQAPGKGLEWVGR
IKSVTDGETTDYAAPVKGRFTISRDDSKSTLYLQMNSLKTEDTAVYYCTS
SFCCRSGSCPSSDTSYCNGQYKSYYYMDVWGKGTTVTVSS,
(SEQ ID NO: 80)
EVQLVESGGALVKPGGSLRLSCAASGFTFSKAWMSWVRQAPGKGLEWVGR
IKSVTDGETTDYAAPVKGRFTISRDDSKSTLYLQMNSLKTEDTAVYYCTS
SFCCRGNQCPSSDTSYCGGQYPSYYYMDPWGKGTTVTVSS,
(SEQ ID NO: 90)
EVQLVESGGALVKPGGSLRLSCAASGFTFSAAWMSWVRQAPGKGLEWVGR
IKSTSDGETTDYAAPVKGRFTISRDDSKSTLYLQMNSLKTEDTAVYYCIS
SFCCRGGSCPSRDTSYCGGQYKSYYFMDVWGKGTTVTVSS,
(SEQ ID NO: 86)
EVQLVESGGALVKPGGSLRLSCAASGFTFSAAWMSWVRQAPGKGLEWVGR
IKSVTDGETTDYAAPVKGRFTISRDDSKSTLYLQMNSLKTEDTAVYYCIS
SFCCRGNSCPSSDTSYCNGQYKSYYYMDVWGKGTTVTVSS,
(SEQ ID NO: 94)
EVQLVESGGALVKPGGSLRLSCAASGFTFSKAWMSWVRQAPGKGLEWVGR
IKSVTDGETTDYAAPVKGRFTISRDDSKSTLYLQMNSLKTEDTAVYYCTS
SFCCRGGSCPSHDTSYCGGQYKSYYYMDVWGKGTTVTVSS,
and
(SEQ ID NO: 95)
EVQLVESGGALVKPGGSLRLSCAASGFTFSKAWMTWVRQAPGKGLEWVGR
IKSVTDGETTDYAAPVKGRFTISRDDSKSVLYLQMSSLKTEDTAVYFCTS
SFCCRGGSCPSHDTSFCGGQDKRYYYMDVWGKGTTVTVSS.

In some embodiments, which may be combined with the preceeding the light chain variable region has a sequence having at least 90% identity to the sequence of any one of

(SEQ ID NO: 138)
QSVLTQPPSASGTPGQRVTISCSGSSSNIGSSSVYWYQQLPGTAPKLLIY
KNNQRPSGVPDRFSGSKSGTSASLAISGLRSEDEADYYCSTWDDALSVRV
FGGGTKLTVL,
(SEQ ID NO: 140)
QSVLTQPPSASGTPGQRVTISCSGSSSNIGSSSVSWYQQLPGTAPKLLIY
KNNQRPSGVPDRFSGSKSGTSASLAISGLRSEDEADYYCSTWDDSLSVRV
FGGGTKLTVL,
(SEQ ID NO: 136)
QSVLTQPPSASGTPGQRVTISCSGSSTNIGSSSVSWYQQLPGTAPKLLIY
KDNQRPSGVPDRFSGSKSGTSASLAISGLRSEDEADYYCSSWDDSNSVRI
FGGGTKLTVL,
(SEQ ID NO: 132)
QSVLTQPPSASGTPGQRVTISCSGSKSNIGSSSVSWYQQLPGTAPKLLIY
KDNQRPSGVPDRFSGSKSGTSASLAISGLRSEDEADYYCATWDNSLSIRV
FGGGTKLTVL,
and
(SEQ ID NO: 141)
QSVLTQAPSASETPGQRVIISCSGSSSNIGSSSVSWYQQLPGTAPKLLIY
KNNQRPSGVPDRFSGSKSGTSASLAISGLRSEDEADYYCSTWDDSLSVRV
FGGGTKLTVL.

[0015] In some embodiments, the antibody comprises an HCDR1 having a sequence GFTFSKAWMS (SEQ ID NO:1); an HCDR2 having a sequence RIKSVTDGETTDYAAPVKG (SEQ ID NO:9); an HCDR3 having a sequence TSSFCCRGGSCPSSDTSYCGGQYKSYYFMDV (SEQ ID NO:32); an LCDR1 having a sequence SGSSSNIGSSSVY (SEQ ID NO:56); an LCDR2 having a sequence KNNQRPS (SEQ ID NO:59); and an LCDR3 having a sequence STWDDALSVRV (SEQ ID NO:72). In some embodiments, the heavy chain variable region has a sequence having at least 90% identity to the sequence of EVQLVESGGALVKPGGSLRLSCAASGFTF SKAWMSWVRQAPGKGLEWVGRIKSVTDG ETTDYAAPVKGRFTISRDDSKSTLYLQMNSLKTEDTAVYYCTSSFCCRGGSCPSSDTSYC GGQYKSYYFMDVWGKGTTVTVSS (SEQ ID NO:92); and the light chain variable region has a sequence having at least 90% identity to the sequence of QSVLTQPPSASGTPGQRVTISCSGSSSNIGSSSVYWYQQLPGTAPKWYKNNQRPSGVPD RFSGSKSGTSASLAISGLRSEDEADYYCSTWDDALSVRVFGGGTKLTVL (SEQ ID NO:138). In some embodiments, the heavy chain variable region comprises a sequence

(SEQ ID NO: 92)
EVQLVESGGALVKPGGSLRLSCAASGFTFSKAWMS
WVRQAPGKGLEWVGRIKSVTDGETTDYAAPVKGRF
TISRDDSKSTLYLQMNSLKTEDTAVYYCTSSFCCR
GGSCPSSDTSYCGGQYKSYYFMDVWGKGTTVTVSS;

and the light chain variable region comprises a sequence

(SEQ ID NO: 138)
QSVLTQPPSASGTPGQRVTISCSGSSSNIGSSSVYWYQQLPGTAPKLLIY
KNNQRPSGVPDRFSGSKSGTSASLAISGLRSEDEADYYCSTWDDSLSVRV
FGGGTKLTVL.

[0016] In some embodiments, the HCDR1 has a sequence GFTFSKAWMS (SEQ ID NO:1); the HCDR2 has a sequence RIKSVTDGETTDYAAPVKG (SEQ ID NO:9); the HCDR3 has a sequence of TSSFCCRSGSCPSSDTSYCNGQYKSYYYMDV (SEQ ID NO:20); the LCDR1 has a sequence SGSSSNIGSSSVS (SEQ ID NO:48); the LCDR2 has a sequence KNNQRPS (SEQ ID NO:59); and the LCDR3 has a sequence STWDDSLSVRV (SEQ ID NO:68). In some embodiments, the heavy chain variable region has a sequence having at least 90% identity to the sequence of

(SEQ ID NO: 77)
EVQLVESGGALVKPGGSLRLSCAASGFTFSKAWMS
WVRQAPGKGLEWVGRIKSVTDGETTDYAAPVKGRF
TISRDDSKSTLYLQMNSLKTEDTAVYYCTSSFCCR
SGSCPSSDTSYCNGQYKSYYYMDVWGKGTTVTVSS;

and the light chain variable region has a sequence having at least 90% identity to the sequence of

(SEQ ID NO: 140)
QSVLTQPPSASGTPGQRVTISCSGSSSNIGSSSVSWYQQLPGTAPKLLIYK
NNQRPSGVPDRFSGSKSGTSASLAISGLRSEDEADYYCSTWDDSLSVRVFG
GGTKLTVL.

[0017] In some embodiments, the heavy chain variable region comprises a sequence

(SEQ ID NO: 77)
EVQLVESGGALVKPGGSLRLSCAASGFTFSKAWMS
WVRQAPGKGLEWVGRIKSVTDGETTDYAAPVKGRF
TISRDDSKSTLYLQMNSLKTEDTAVYYCTSSFCCR
SGSCPSSDTSYCNGQYKSYYYMDVWGKGTTVTVSS;

and the light chain variable region comprises a sequence

(SEQ ID NO: 140)
QSVLTQPPSASGTPGQRVTISCSGSSSNIGSSSVSWYQQLPGTAPKLLIYK
NNQRPSGVPDRFSGSKSGTSASLAISGLRSEDEADYYCSTWDDSLSVRVFG
GGTKLTVL

[0018] In some embodiments, the HCDR1 has a sequence GFTFSKAWMS (SEQ ID NO:1); the HCDR2 has a sequence RIKSVTDGETTDYAAPVKG (SEQ ID NO:9); the HCDR3 has a sequence TSSFCCRGNQCPSSDTSYCGGQYPSYYYMDP (SEQ ID NO:23); the LCDR1 has a sequence SGSSSNIGSSSVS (SEQ ID NO:48); the LCDR2 has a sequence KNNQRPS (SEQ ID NO:59); and the LCDR3 has a sequence STWDDSLSVRV (SEQ ID NO:68).

[0019] In some embodiments, the heavy chain variable region has a sequence having at least 90% identity to the sequence of

(SEQ ID NO: 80)
EVQLVESGGALVKPGGSLRLSCAASGFTFSKAWMS
WVRQAPGKGLEWVGRIKSVTDGETTDYAAPVKGRF
TISRDDSKSTLYLQMNSLKTEDTAVYYCTSSFCCR
GNQCPSSDTSYCGGQYPSYYYMDPWGKGTTVTVS
S;

and the light chain variable region has a sequence having at least 90% identity to the sequence of

(SEQ ID NO: 140)
QSVLTQPPSASGTPGQRVTISCSGSSSNIGSSSVSWYQQLPGTAPKLLIYK
NNQRPSGVPDRFSGSKSGTSASLAISGLRSEDEADYYCSTWDDSLSVRVFG
GGTKLTVL.

[0020] In some embodiments, the heavy chain variable region comprises a sequence

(SEQ ID NO: 80)
EVQLVESGGALVKPGGSLRLSCAASGFTFSKAWMS
WVRQAPGKGLEWVGRIKSVTDGETTDYAAPVKGRF
TISRDDSKSTLYLQMNSLKTEDTAVYYCTSSFCCR
GNQCPSSDTSYCGGQYPSYYYMDPWGKGTTVTVS
S;

and the light chain variable region comprises a sequence

(SEQ ID NO: 140)
QSVLTQPPSASGTPGQRVTISCSGSSSNIGSSSVSWYQQLPGTAPKLLIYK
NNQRPSGVPDRFSGSKSGTSASLAISGLRSEDEADYYCSTWDDSLSVRVFG
GGTKLTVL.

[0021] In some embodiments, the HCDR1 has a sequence GFTFSAAWMS (SEQ ID NO:4); the HCDR2 has a sequence RIKSTSDGETTDYAAPVKG (SEQ ID NO:15); the HCDR3 has a sequence ISSFCCRGGSCPSRDTSYCGGQYKSYYFMDV (SEQ ID NO:30); the LCDR1 has a sequence SGSSTNIGSSSVS (SEQ ID NO:54); the LCDR2 has a sequence KDNQRPS (SEQ ID NO:62); and the LCDR3 has a sequence SSWDDSNSVRI (SEQ ID NO:71).

[0022] In some embodiments, the heavy chain variable region has a sequence having at least 90% identity to the sequence of

(SEQ ID NO: 90)
EVQLVESGGALVKPGGSLRLSCAASGFTFSAAWMS
WVRQAPGKGLEWVGRIKSTSDGETTDYAAPVKGRF
TISRDDSKSTLYLQMNSLKTEDTAVYYCISSFCCR
GGSCPSRDTSYCGGQYKSYYFMDVWGKGTTVTVSS
;

and the light chain variable region has a sequence having at least 90% identity to the sequence of

(SEQ ID NO: 136)
QSVLTQPPSASGTPGQRVTISCSGSSTNIGSSSVSWYQQLPGTAPKLLIYK
DNQRPSGVPDRFSGSKSGTSASLAISGLRSEDEADYYCSSWDDSNSVRIFG
GGTKLTVL.

[0023] In some embodiments, the heavy chain variable region comprises a sequence

(SEQ ID NO: 90)
EVQLVESGGALVKPGGSLRLSCAASGFTFSAAWMS
WVRQAPGKGLEWVGRIKSTSDGETTDYAAPVKGRF
TISRDDSKSTLYLQMNSLKTEDTAVYYCISSFCCR
GGSCPSRDTSYCGGQYKSYYFMDVWGKGTTVTVSS
;

and the light chain variable region comprises a sequence

(SEQ ID NO: 136)
QSVLTQPPSASGTPGQRVTISCSGSSTNIGSSSVSWYQQLPGTAPKLLIY
KDNQRPSGVPDRFSGSKSGTSASLAISGLRSEDEADYYCSSWDDSNSVRI
FGGGTKLTVL.

[0024] In some embodiments, the antibody has an HCDR1 sequence GFTFSAAWMS (SEQ ID NO:4); an HCDR2 sequence RIKSVTDGETTDYAAPVKG (SEQ ID NO:9); an HCDR3 sequence ISSFCCRGNSCPSSDTSYCNGQYKSYYYMDV (SEQ ID NO:27); an LCDR1 sequence SGSKSNIGSSSVS (SEQ ID NO:51); an LCDR2 sequence KDNQRPS (SEQ ID NO:62); and an LCDR3 sequence ATWDNSLSIRV (SEQ ID NO:70).

[0025] In some embodiments, heavy chain variable region has a sequence having at least 90% identity to the sequence of

(SEQ ID NO: 86)
EVQLVESGGALVKPGGSLRLSCAASGFTFSAAWMS
WVRQAPGKGLEWVGRIKSVTDGNGQYKSYYYMDVW
GKGTTVTVSS

and the light chain variable region has a sequence having at least 90% identity to the sequence of

(SEQ ID NO: 132)
QSVLTQPPSASGTPGQRVTISCSGSKSNIGSSSVSWYQQLPGTAPKLLIYK
DNQRPSGVPDRFSGSKSGTSASLAISGLRSEDEADYYCATWDNSLSIRVFG
GGTKLTVL.

[0026] In some embodiments, the heavy chain variable region comprises a sequence

(SEQ ID NO: 86)
EVQLVESGGALVKPGGSLRLSCAASGFTFSAAWMS
WVRQAPGKGLEWVGRIKSVTDGETTDYAAPVKGRF
TISRDDSKSTLYLOMNSLKTEDTAVYYCISSFCCR
GNSCPSSDTSYCNGQYKSYYYMDVWGKGTTVTVSS;

and the light chain variable region comprises a sequence

(SEQ ID NO: 132)
QSVLTQPPSASGTPGQRVTISCSGSKSNIGSSSVSWYQQLPGTAPKLLIYK
DNQRPSGVPDRFSGSKSGTSASLAISGLRSEDEADYYCATWDNSLSIRVFG
GGTKLTVL.

[0027] In some embodiments, the antibody comprises an HCDR1 sequence GFTFSKAWMT (SEQ ID NO:8); an HCDR2 sequence RIKSVTDGETTDYAAPVKG (SEQ ID NO:9); an HCDR3 sequence TSSFCCRGGSCPSHDTSFCGGQDKRYYYMDV (SEQ ID NO:34); an LCDR1 sequence SGSSSNIGSSSVS (SEQ ID NO:48); an LCDR2 sequence KNNQRPS (SEQ ID NO:59); and an LCDR3 sequence STWDDSLSVRV (SEQ ID NO:68).

[0028] In some embodiments, the heavy chain variable region has a sequence having at least 90% identity to the sequence of

(SEQ ID NO: 95)
EVQLVESGGALVKPGGSLRLSCAASGFTFSKAWMT
WVRQAPGKGLEWVGRIKSVTDGETTDYAAPVKGRF
TISRDDSKSVLYLQMSSLKTEDTAVYFCTSSFCCR
GGSCPSHDTSFCGGQDKRYYYMDVWGKGTTVTVSS;

and the light chain variable region has a sequence having at least 90% identity to the sequence of

(SEQ ID NO: 141)
QSVLTQAPSASETPGQRVIISCSGSSSNIGSSSVSWYQQLPGTAPKLLIYK
NNQRPSGVPDRFSGSKSGTSASLAISGLRSEDEADYYCSTWDDSLSVRVFG
GGTKLTVL.

[0029] In some embodiments, the heavy chain variable region comprises a sequence

(SEQ ID NO: 95)
EVQLVESGGALVKPGGSLRLSCAASGFTFSKAWMT
WVRQAPGKGLEWVGRIKSVTDGGGQDKRYYYMDVW
GKGTTVTVSS;

and the light chain variable region has a sequence comprises a sequence

(SEQ ID NO: 141)
QSVLTQAPSASETPGQRVIISCSGSSSNIGSSSVSWYQQLPGTAPKLLIYK
NNQRPSGVPDRFSGSKSGTSASLAISGLRSEDEADYYCSTWDDSLSVRVFG
GGTKLTVL.

[0030] In some embodiments, the antibody comprises a heavy chain variable region comprising: an HCDR1 comprising a sequence GFTFSKAWMT (SEQ ID NO:8) or GFTFSKAWMS (SEQ ID NO:1), or a variant HCDR1 in which 1 or 2 amino acids are substituted relative to the sequence; an HCDR2 comprising a sequence RIKSVTDGETTDYAAPVKG (SEQ ID NO:9), or a variant HCDR2 in which 1 or 2 amino acids are substituted relative to the sequence; and an HCDR3 comprising a sequence TSSFCCRGGSCPSHDTSYCGGQYKSYYYMDV (SEQ ID NO:21), or a variant HCDR3, in which 1, 2, or 3 amino acids are substituted relative to the sequence; a light chain variable region comprising: an LCDR1 comprising a sequence SGSSDNIGSSSVS (SEQ ID NO:1741), or a variant LCDR1 in which 1 or 2 amino acids are substituted relative to the sequence; an LCDR2 comprising a sequence KNNQRPS (SEQ ID NO:59), or variant LCDR2 in which 1 or 2 amino acids are substituted relative to the sequence; and an LCDR3 comprising a sequence STWDDSLSVRV (SEQ ID NO:68), or a variant LCDR3 in which 1 or 2 amino acids are substituted relative to the sequence.

[0031] In some embodiments, the antibody comprises: a heavy chain variable region comprising an FR1 that comprises a substitution at 1, 2, or 3 positions relative to the corresponding FR1 sequence of a VH region of any one of SEQ ID NOS:77-122 or 1333-1526 or 1725, an FR2 that comprises a substitution at 1, 2 or 3 positions relative to the corresponding FR2 sequence of a VH region of any one of SEQ ID NOS:77-122 or 1333-1526 or 1725, an FR3 that comprises a substitution at 1, 2, or 3 positions relative to the corresponding FR3 sequence of a VH region of any one of SEQ ID NOS:77-122 or 1333-1526 or 1725; and/or an FR4 that comprises a substitution at 1 or 2 positions relative to the corresponding FR4 sequence of a VH region of any one of SEQ ID NOS:77-122 or 1333-1526 or 1725; and a light chain variable region comprising an FR1 that comprises a substitution at 1, 2, or 3 positions relative to the corresponding FR1 sequence of a VL region any one of SEQ ID NOS:123-168 or 1527-1720 or 1726, an FR2 that comprises a substitution at 1, 2, or 3 positions relative to the corresponding FR2 sequence of a VL region any one of SEQ ID NOS:123-168 or 1527-1720 or 1726, an FR3 that comprises a substitution at 1, 2 or 3 positions relative to the corresponding FR3 sequence of a VL region any one of SEQ ID NOS:123-168 or 1527-1720 or 1726; and/or an FR4 that comprises a substitution at 1 or 2 positions relative to the corresponding FR4 sequence of a VL region any one of SEQ ID NOS:123-168 or 1527-1720 or 1726.

[0032] In some embodiments, the antibody comprises a V_{H} having at least 95% identity to any one of SEQ ID NOS:77-122 or 13333-1526 or 1725; and a corresponding V_{L} having at least 95% identity to any one of SEQ ID NOS:123-168 or 1527-1720 or 1726.

[0033] In some embodiments, the antibody comprises a heavy chain constant region sequence of SEQ ID NO:1721 and a light chain constant region sequence of SEQ ID NO:1722.

[0034] In a further aspect, provided herein is an antibody that binds to an extracellular RNA-protein complex, wherein the antibody comprises: a heavy chain variable region comprising: an HCDR1 comprising a sequence GFTFSKAWMS (SEQ ID NO:1), or a variant HCDR1 in which 1 amino acid is substituted relative to the sequence; an HCDR2 comprising a sequence RIKSVTDGETTDYAAPVKG (SEQ ID NO:9), or a variant HCDR2 in which 1 amino acid is substituted relative to the sequence; and an HCDR3 comprising a sequence TSSFCCRGGSCPSHDTSYCGGQYKSYYYMDV (SEQ ID NO:21), or a variant HCDR3 in which 1, 2, or 3 amino acids are substituted relative to the sequence; and a light chain variable region comprising: an LCDR1 comprising a sequence SGSSSNIGSSSVS (SEQ ID NO:48), or a variant LCDR1 in which 1 amino acid is substituted relative to the sequence; an LCDR2 comprising a sequence KNNQRPS (SEQ ID NO:59), or variant LCDR2 in which 1 amino acid is substituted relative to the sequence; and an LCDR3 comprising a sequence STWDDSLSVRV (SEQ ID NO:68), or a variant LCDR3 in which 1 amino acid is substituted relative to the sequence.

[0035] In some embodiments, the antibody comprises an HCDR1 comprising a sequence GFTFSKAWMS (SEQ ID NO:1), an HCDR2 comprising a sequence RIKSVTDGETTDYAAPVKG (SEQ ID NO:9), an HCDR3 comprising a sequence TSSFCCRGGSCPSHDTSYCGGQYKSYYYMDV (SEQ ID NO:21), an LCDR1 comprising a sequence SGSSSNIGSSSVS (SEQ ID NO:48), an LCDR2 comprising a sequence KNNQRPS (SEQ ID NO:59), and an LCDR3 comprising a sequence STWDDSLSVRV (SEQ ID NO:68). In some embodiments, the V_{H} comprises an amino acid sequence having at least 95% identity to

(SEQ ID NO: 94)
EVQLVESGGALVKPGGSLRLSCAASGFTFSKAWMS
WVRQAPGKGLEWVGRIKSVTDGETTDYAAPVKGRF
TISRDDSKSTLYLQMNSLKTEDTAVYYCTSSFCCR
GGSCPSHDTSYCGGQYKSYYYMDVWGKGTTVTVSS;

and the V_{L} comprises an amino sequence having at 95% identity to

(SEQ ID NO: 140)
QSVLTQPPSASGTPGQRVTISCSGSSSNIGSSSVS
WYQQLPGTAPKLLIYKNNQRPSGVPDRFSGSKSGT
SASLAISGLRSEDEADYYCSTWDDSLSVRVFGGGT
KLTVL.

In some embodiments, the V_{H} comprises a sequence

(SEQ ID NO: 94)
EVQLVESGGALVKPGGSLRLSCAASGFTFSKAWMS
WVRQAPGKGLEWVGRIKSVTDGETTDYAAPVKGRF
TISRDDSKSTLYLQMNSLKTEDTAVYYCTSSFCCR
GGSCPSHDTSYCGGQYKSYYYMDVWGKGTTVTVSS;

and the V_{L} comprises a sequence

(SEQ ID NO: 140)
QSVLTQPPSASGTPGQRVTISCSGSSSNIGSSSVS
WYQQLPGTAPKLLIYKNNQRPSGVPDRFSGSKSGT
SASLAISGLRSEDEADYYCSTWDDSLSVRVFGGGT
KLTVL.

In some embodiments, the antibody comprises a heavy chain constant region sequence of SEQ ID NO:1721 and a light chain constant region sequence of SEQ ID NO:1722. In some embodiments, the heavy chain comprises a sequence of SEQ ID NO:1723 and the light chain comprises a sequence of SEQ ID NO:1724.

[0036] In a further aspect, provided herein is a method of inducing an immune response, the method comprising administering any one of the antibodies described in the preceding paragraphs in this section to a subject. In some embodiments, the immune response comprises an ADCP response. In some embodiments, the antibody is administered intravenously.

[0037] In a further aspect, provided herein is a method of treating a cancer patient having a tumor that comprises an extracellular RNA-protein complex, the method comprising administering any one of the antibodies described in the preceding paragraphs to the patient. In some embodiments, the antibody is an antibody as described in any of the ninth through thirty second paragraphs of the Brief Summary section. In some embodiments, the cancer is lung cancer, breast cancer, colorectal cancer, esophageal cancer, stomach cancer, kidney cancer, ovarian cancer, melanoma, uterine cancer, liver cancer, bladder cancer, or testicular cancer. In some embodiments, the cancer is non-small cell lung cancer, triple negative breast cancer, colorectal cancer, ovarian cancer or melanoma. In some embodiments, the antibody is administered intravenously. In some embodiments, the method further comprises administering chemotherapy and/or radiation therapy. In some embodiments, the method further comprises administering an agent that targets an immunological checkpoint antigen. In some embodiments, the agent is a monoclonal antibody. In some embodiments, the monoclonal antibody blocks PD-1 ligand binding to PD-1. In some embodiments, the monoclonal antibody is an anti-PD-1 antibody.

[0038] In a further aspect, provided herein is a method of identifying a patient that has a tumor comprising an extracellular RNA-protein complex, the method comprising contacting a tumor sample from the patient with an antibody as described in the preceding paragraphs.

[0039] In another aspect, provided herein is an expression vector comprising a polynucleotide encoding the V_{H} region of an antibody as set forth in the preceding paragraphs. Additionally provided herein is an expression vector comprising a polynucleotide encoding the V_{L} region of an antibody of as set forth in the preceding paragraphs. In some embodiments, an expression vector comprises a polynucleotide encoding the V_{H} region and the V_{L} region of the antibody. In some embodiments, an express vector provided herein comprises a polynucleotide encoding a V_{H} or V_{L} CDR3 of an antibody set forth in any one of the preceding paragraphs. Also provided herein are host cells that comprise an expression vector as described in this paragraph. In some embodiments, the host cell is a CHO cell, such as a CHO K-1 cell.

[0040] Additionally provided herein is a method of producing an antibody, the method comprising culturing a host cell as described in the preceding paragraph under conditions in which the polynucleotide encoding the heavy chain and the polynucleotide encoding the light chain are expressed.

[0041] In a further aspect, provided herein is a method of identifying an antibody having anti-tumor activity, the method comprising mutagenizing a polynucleotide encoding a V_{H} or a V_{L} CDR3 of any one of the antibodies as described in the preceding paragraphs, expressing an antibody comprising the mutagenized V_{H} or V_{L} CDR3; and selecting an antibody that inhibits tumor growth or decreases tumor size, tumor invasion, and/or metastasis in vivo.

[0042] In a further aspect, provided herein is a use of any one of the antibodies described in the preceding paragraphs in a method of inducing an immune response in vivo. Further provided herein is a use of any one of the antibodies described in the preceding paragraphs for a method of treating cancer. In some embodiments, cancer is treated in a subject having a tumor that comprises an extracellular RNA-protein complex. In some embodiments, the cancer is lung cancer, breast cancer, colorectal cancer, esophageal cancer, stomach cancer, kidney cancer, ovarian cancer, melanoma, uterine cancer, liver cancer, bladder cancer, or testicular cancer. In some embodiments, the cancer is non-small cell lung cancer, triple negative breast cancer, colorectal cancer, ovarian cancer or melanoma. In some embodiments, the antibody is administered intravenously. In some embodiments, the method further comprises administering chemotherapy and/or radiation therapy. In some embodiments, the method further comprising an agent that targets an immunological checkpoint antigen. In some embodiments, the agent is a monoclonal antibody. In some embodiments, the monoclonal antibody blocks PD-1 ligand binding to PD-1. In some embodiments, the monoclonal antibody is an anti-PD-1 antibody.

[0043] In a further aspect, provided herein is a polypeptide comprising a V_{H} sequence

(SEQ ID NO: 94)
EVQLVESGGALVKPGGSLRLSCAASGFTFSKAWMS
WVRQAPGKGLEWVGRIKSVTDGETTDYAAPVKGRF
TISRDDSKSTLYLQMNSLKTEDTAVYYCTSSFCCR
GGSCPSHDTSYCGGQYKSYYYMDVWGKGTTVTVS
S;

and a V_{L} sequence

(SEQ ID NO: 140)
QSVLTQPPSASGTPGQRVTISCSGSSSNIGSSSVS
WYQQLPGTAPKLLIYKNNQRPSGVPDRFSGSKSGT
SASLAISGLRSEDEADYYCSTWDDSLSVRVFGGGT
KLTVL.

Additionally provided herein is a polypeptide comprising a heavy chain sequence of SEQ ID NO:1723 and a light chain region sequence of SEQ ID NO:1724.

[0044] In further aspect, provided herein is an anti-tumor antibody comprising a heavy chain variable (V_{H}) region and a light chain variable (_{L}) region, wherein: (a) the V_{H} region comprises a CDR1 sequence comprising GFTFSKAWMS (SEQ ID NO:1), or a variant thereof having 1, 2, or 3 substitutions, a CDR2 sequence comprising RIKSVTDGETTDYAAPVKG (SEQ ID NO:9), RIKSVTEGETTDYAAPVKG (SEQ ID NO:17), or RIKSTSDGGITDYAAPVKG (SEQ ID NO:16), or a variant of the CDR2 sequence having 1, 2, 3, 4, or 5 amino acid substitutions; and a CDR3 sequence comprising T(S/T)SFCCRGG(R/S)CPS(H/R)DTS(Y/F)CGG(Q/S)(Y/D)(K/N/S)(R/S)YYYMDV (SEQ ID NO: 1747), as numbered with reference to any one of SEQ ID NOS:77-122; and (b) the V_{L} region comprises a CDR1 sequence comprising SGSSSNIGSSSVS (SEQ ID NO:48), or a variant thereof having 1, 2, 3, or 4 amino acid substitutions, a CDR2 comprising KNNQRPS (SEQ ID NO:59), or a variant thereof having 1 or 2 amino acid substitutions, and a CDR3 sequence comprising STWD(D/E)DSLSVRV (SEQ ID NO: 1748), as numbered with reference to any one of SEQ ID NOS:77-122. In some embodiments, the V_{H} region comprises a CDR1 variant sequence GFTFSKAWM(S/T) (SEQ ID NO: 1749) and/or a CDR2 sequence RIKS(V/T)(T/S)(D/E)G(E/G)(I/T)TDYAAPVKG (SEQ ID NO: 1750). In some embodiments, the V_{H} CDR3 sequence comprises:

(SEQ ID NO: 1751)
T(S/T)SFCCRGG(R/S)CPS(H/R)DTS(Y/F)CGG(Q/S)YKSYYYMD
V,
(SEQ ID NO: 1752)
T(S/T)SFCCRGG(R/S)CPS(H/R)DTS(Y/F)CGG(Q/S)DSRYYYMD
V,
(SEQ ID NO: 1753)
T(S/T)SFCCRGG(R/S)CPS(H/R)DTS(Y/F)CGG(Q/S)YNRYYYMD
V,
(SEQ ID NO: 1754)
T(S/T)SFCCRGG(R/S)CPS(H/R)DTS(Y/F)CGG(Q/S)YNSYYYMD
V,
or
(SEQ ID NO: 1755)
T(S/T)SFCCRGG(R/S)CPS(H/R)DTS(Y/F)CGG(Q/S)DKRYYYMD
V.

In some embodiments, the V_{H} region comprises a CDR1 variant sequence GFTFSKAWMT (SEQ ID NO:8), a CDR2 sequence RIKSVT(D/E)GETTDYAAPVKG (SEQ ID NO: 1756), and a CDR3 sequence T(S/T)SFCCRGGSCPSHDTS(Y/F)CGG(Q/S)(Y/D)(K/N/S)(R/S)YYYMDV (SEQ ID NO: 1757), e.g.,

(SEQ ID NO: 1758)
T(S/T)SFCCRGGSCPSHDTS(Y/F)CGG(Q/S)YKSYYYMDV,
(SEQ ID NO: 1759)
T(S/T)SFCCRGGSCPSHDTS(Y/F)CGG(Q/S)DSRYYYMDV,
(SEQ ID NO: 1760)
T(S/T)SFCCRGGSCPSHDTS(Y/F)CGG(Q/S)YNRYYYMDV,
or
(SEQ ID NO: 1761)
T(S/T)SFCCRGGSCPSHDTS(Y/F)CGG(Q/S)DKRYYYMDV.

In some embodiments, the V_{H} comprises a CDR3 sequence

(SEQ ID NO: 37)
TSSFCCRGGSCPSHDTSFCGGQYKSYYYMDV,
(SEQ ID NO: 39)
TTSFCCRGGSCPSHDTSFCGGQYKSYYYMDV,
(SEQ ID NO: 40)
TSSFCCRGGSCPSHDTSFCGGQDSRYYYMDV,
(SEQ ID NO: 21)
TSSFCCRGGSCPSHDTSYCGGQYKSYYYMDV,
(SEQ ID NO: 41)
TSSFCCRGGSCPSHDTSFCGGSYKSYYYMDV,
(SEQ ID NO: 42)
TSSFCCRGGSCPSHDTSYCGGQDSRYYYMDV,
(SEQ ID NO: 36)
TSSFCCRGGSCPSHDTSFCGGQYNRYYYMDV,
(SEQ ID NO: 1740)
TSSFCCRGGRCPSRDTSFCGGQYNSYYYMDV,
(SEQ ID NO: 34)
TSSFCCRGGSCPSHDTSFCGGQDKRYYYMDV,
or
(SEQ ID NO: 35)
TTSFCCRGGSCPSHDTSFCGGQDKRYYYMDV.

In some embodiments, the anti-tumor antibody comprises a V_{H} CDR1, CDR2, and/or CDR3 as set forth in Table 1B. In some embodiments, the anti-tumor antibody comprises a V_{L} region comprising a CDR1 sequence SGSSSNIGSSSVS (SEQ ID NO:48), or a variant thereof having 1, 2, 3, or 4 amino acid substitutions; a CDR2 sequence KNNQRPS (SEQ ID NO:59), or a variant thereof having 1, 2, or 3 substitutions, and a CDR3 sequence STWD(D/E)SLSVRV (SEQ ID NO: 1762). In some embodiments, the CDR1 sequence is SGSSSNIGSSSVS (SEQ ID NO:48) and/or the CDR2 sequence is KNNQRPS (SEQ ID NO:59).

[0045] Further provided herein is an anti-tumor antibody comprising a V_{H} region and a V_{L} region, wherein: (a) the V_{H} region comprises a CDR1 sequence having at least 80% identity to a CDR1 sequence set forth in Table 1B, at least 80% identity to a CDR2 sequence set forth in Table 1B; and at least 80% identity to a CDR3 sequence set forth in Table Table 1B; and (b) the V_{L} region comprises: (i) a CDR1 sequence having at least 80% identity of a CDR1 sequence set forth in Table 1B a CDR2 sequence having at least 80% identity to a CDR2 sequence set forth in Table 1B and a CDR3 sequence having at least 80% identity to a CDR3 sequence set forth in 1B. In some embodiments, the antibody comprises a V_{H} comprising an FR1 having at least 90% identity to the amino acid sequence from positions 1 to 25 of any one of SEQ ID NOS:77-122, an FR2 having at least 90% identity to the amino acid sequence from positions 36 to 49 of any one of SEQ ID NOS:77-122, an FR3 having at least 90% identity to the amino acid sequence from positions 69 to 98 of any one of SEQ ID NOS: of any one of SEQ ID NOS:77-122; and/or an FR4 having at least 90% identity to the amino acid sequence from positions 130-140 as determined with reference to any one of SEQ ID NOS: of any one of SEQ ID NOS:77-122. In some embodiments, the anti-tumor antibody comprises a V_{L} comprising an FR1 having at least 90% identity to the amino acid sequence from positions 1 to 22 of one of SEQ ID NOS:123-168, an FR2 having at least 90% identity to the amino acid sequence from positions 36 to 50 of any one of SEQ ID NOS: 123-168, an FR3 having at least 90% identity to the amino acid sequence from positions 58 to 89 of any one of SEQ ID NOS: 123-168; and/or an FR4 having at least 90% identity to the amino acid sequence from positions 101 to 110 as determined with reference to any one of SEQ ID NOS: 123-168. In some embodiments, the antibody comprises a V_{H} region having at least 70% identity to any one of SEQ ID NOS:77-122; and/or a V_{L} having at least 70% identity to any one of SEQ ID NOS:123-168. In some embodiments, the V_{H} region has at least 80% identity to any one of SEQ ID NOS:77-122; and/or the V_{L} region has at least 80% identity to any one of SEQ ID NOS:123-168. In some embodiments, the V_{H} region has at least 90% identity to any one of SEQ ID NOS:77-122; and/or the V_{L} region has at least 90% identity to any one of SEQ ID NOS:123-168. In further embodiments, the V_{H} region has at least 95% identity to any one of SEQ ID NOS:77-122; and/or the V_{L} region has at least 95% identity to any one of SEQ ID NOS:123-168.

[0046] In some embodiments, an anti-tumor antibody or antibody that can be employed to evaluate a tumor sample that has an extracellular RNA-protein complex comprises:

a V_{H} region comprising amino acid sequence SEQ ID NO:101 and a V_{L} region comprising amino acid sequence SEQ ID NO:147;
a V_{H} region comprising amino acid sequence SEQ ID NO:102 and a V_{L} region comprising amino acid sequence SEQ ID NO:148;
a V_{H} region comprising amino acid sequence SEQ ID NO:203 and a V_{L} region comprising amino acid sequence SEQ ID NO:149;
a V_{H} region comprising amino acid sequence SEQ ID NO:104 and a V_{L} region comprising amino acid sequence SEQ ID NO:150;
a V_{H} region comprising amino acid sequence SEQ ID NO:105 and a V_{L} region comprising amino acid sequence SEQ ID NO:151;
a V_{H} region comprising amino acid sequence SEQ ID NO:106 and a V_{L} region comprising amino acid sequence SEQ ID NO:152;
a V_{H} region comprising amino acid sequence SEQ ID NO:107 and a V_{L} region comprising amino acid sequence SEQ ID NO:153;
a V_{H} region comprising amino acid sequence SEQ ID NO:94 and a V_{L} region comprising amino acid sequence SEQ ID NO:140;
a V_{H} region comprising amino acid sequence SEQ ID NO:1335 and a V_{L} region comprising amino acid sequence SEQ ID NO:1529;
a V_{H} region comprising amino acid sequence SEQ ID NO:108 and a V_{L} region comprising amino acid sequence SEQ ID NO:154;
a V_{H} region comprising amino acid sequence SEQ ID NO:97 and a V_{L} region comprising amino acid sequence SEQ ID NO:143;
a V_{H} region comprising amino acid sequence SEQ ID NO:98 and a V_{L} region comprising amino acid sequence SEQ ID NO:144;
a V_{H} region comprising amino acid sequence SEQ ID NO:109 and a V_{L} region comprising amino acid sequence SEQ ID NO:155;
a V_{H} region comprising amino acid sequence SEQ ID NO:110 and a V_{L} region comprising amino acid sequence SEQ ID NO:156;
a V_{H} region comprising amino acid sequence SEQ ID NO:1136 and a V_{L} region comprising amino acid sequence SEQ ID NO:1530;
a V_{H} region comprising amino acid sequence SEQ ID NO:99 and a V_{L} region comprising amino acid sequence SEQ ID NO:145;
a V_{H} region comprising amino acid sequence SEQ ID NO:95 and a V_{L} region comprising amino acid sequence SEQ ID NO:141;
a V_{H} region comprising amino acid sequence SEQ ID NO:100 and a V_{L} region comprising amino acid sequence SEQ ID NO:146;
a V_{H} region comprising amino acid sequence SEQ ID NO:96 and a V_{L} region comprising amino acid sequence SEQ ID NO:142;
a V_{H} region comprising amino acid sequence SEQ ID NO:1333 and a V_{L} region comprising amino acid sequence SEQ ID NO:1527; or
a V_{H} region comprising amino acid sequence SEQ ID NO:1334 and a V_{L} region comprising amino acid sequence SEQ ID NO:1528.

[0047] In some embodiments, an antibody as described herein, e.g., an anti-tumor antibody having a V_{H} and corresponding V_{L} set forth in Table 1A, comprises an IgG1 heavy chain constant region having at least 90% identity to SEQ ID NO:1721 and a lambda light chain constant region having at least 90% identity to SEQ ID NO:1722. In some embodiments, the IgG1 heavy chain constant region comprises the sequence of SEQ ID NO:1721 and the lambda light chain constant region comprises the sequence of SEQ ID NO:1722.

[0048] In a further aspect, provided here is an expression vector comprising a polynucleotide encoding the V_{H} region and/or the V_{L} region of an antibody as described herein, e.g., in the preceding two paragraphs. Additionally, provided herein is an expression vector comprising a polynucleotide encoding a V_{H} or V_{L} CDR3 of an anti-tumor antibody as described herein, e.g., in the preceding two paragraphs. The disclosure further provides a host cell comprising an expression vector of the present disclosure, e.g., as described herein; or a host cell that comprises a polynucleotide as that encodes a V_{H} region and/or a V_{L} region of the anti-tumor antibody as described herein, e.g., in the preceding two paragraphs.

[0049] In an additional aspect, provided herein is a method of identifying an antibody having anti-tumor activity, or tumor-binding activity, the method comprising mutagenizing a polynucleotide encoding a V_{H} or a V_{L} CDR3 as set forth in Table 1B or 2B, expressing an antibody comprising the mutagenized V_{H} or V_{L} CDR3; and selecting an antibody that inhibits tumor growth, decreases tumor size, decreases tumor invasion and/or metastasis in vivo.

[0050] In a further aspect, provided herein is a method of treating a cancer, the method comprising administering an antibody of the present disclosure to a patient that has cancer, such as lung cancer, breast cancer, colorectal cancer, esophageal cancer, stomach cancer, kidney cancer, ovarian cancer, melanoma, uterine cancer, liver cancer, bladder cancer, or testicular cancer. In some embodiments, the patient is also administered a chemotherapeutic agent and/or radiation therapy, e.g., prior to receiving the anti-tumor antibody. In some embodiments, the patient is additionally administered a therapeutic agent that targets an immunological checkpoint antigen, e.g., the therapeutic agent is a checkpoint inhibitor such as a monoclonal antibody that targets the PD-1/PD-L1 immunological checkpoint, such as an anti-PD-1 antibody or an anti-PD-L1 antibody.

[0051] In a further aspect, provided herein is an anti-tumor antibody comprising a heavy chain and a light chain, wherein the heavy chain comprises a heavy chain variable region (V_{H}) that comprises a CDR1 comprising GFTFSKAWMS (SEQ ID NO:1), a CDR2 comprising RIKSVTDGETTDYAAPVKG (SEQ ID NO:9), and a CDR3 comprising TSSFCCRGGSCPSHDTSYCGGQYKSYYYMDV (SEQ ID NO:21); and the light chain comprises a light chain variable region (V_{L}) that comprises a CDR1 comprising SGSSSNIGSSSVS (SEQ ID NO:48), a CDR2 comprising KNNQRPS (SEQ ID NO:59), and a CDR3 comprising STWDDSLSVRV (SEQ ID NO:68); and further wherein the antibody comprises an IgG1 heavy chain constant region having at least 90% identity to SEQ ID NO:1721 and a lambda light chain constant region having at least 90% identity to SEQ ID NO:1722. In some embodiments, the IgG1 heavy chain constant region comprises the sequence of SEQ ID NO:1721 and the lambda light chain constant region comprises the sequence of SEQ ID NO:1722. In some embodiments, the anti-tumor antibody comprises a V_{H} region having a sequence of SEQ ID NO:94 and a V_{L} region having a sequence of SEQ ID NO:140. In some embodiments an anti-tumor antibody as described herein comprises a heavy chain amino acid sequence of SEQ ID NO:1723 and a light chain amino acid sequence of SEQ ID NO:1724.

[0052] In another aspect, provided herein is a pharmaceutical composition comprising an anti-tumor antibody as described herein, e.g., in the previous paragraph, and a physiologically acceptable carrier. In some embodiments, the pharmaceutical composition comprises 20 mM histidine buffer, 8% (w/v) sucrose, 0.02% (w/v) polysorbate 80 at pH 5.5. In some embodiments, the antibody is stored at a concentration of 20 mg/ml.

[0053] In another aspect, provided herein is a method of treating cancer that comprises administering a pharmaceutical composition of the previous paragraph above to a patient that has cancer. In some embodiments, the patient has lung cancer, breast cancer, colorectal cancer, esophageal cancer, stomach cancer, kidney cancer, ovarian cancer, melanoma, uterine cancer, liver cancer, bladder cancer, or testicular cancer. In particular embodiments, the patient has non-small cell lung cancer, colorectal cancer, breast cancer, ovarian cancer, or melanoma. In certain embodiments, the melanoma is acral melanoma. In some embodiments, the pharmaceutical composition is administered intravenously. In particular embodiments, the pharmaceutical composition is administered intravenously at a dose in the range of 0.1 mg/kg to 100 mg/kg (e.g., 0.3 mg/kg to 30 mg/kg). In some embodiments, the pharmaceutical composition is administered once every three weeks. In some embodiments, the method can further comprise administering chemotherapy and/or radiation therapy. In some embodiments, the method can further comprise administering an agent that targets an immunological checkpoint antigen. In certain embodiments, the agent that targets an immunological checkpoint antigen can be a monoclonal antibody, e.g., a monoclonal antibody that blocks PD-1 ligand binding to PD-1. In certain embodiments, the monoclonal antibody is an anti-PD-1 antibody.

[0054] In another aspect, provided herein is a polynucleotide comprising a nucleic acid sequence encoding a heavy chain of an anti-tumor antibody described herein. In another aspect, provided herein is an expression vector comprising the polynucleotide. In another aspect, the disclosure also features a host cell that comprises the polynucleotide. In another aspect, the disclosure also features a host cell that comprises the expression vector.

[0055] In another aspect, the disclosure features a polynucleotide comprising a nucleic acid sequence encoding a light chain of an anti-tumor antibody described herein. In another aspect, the disclosure also features an expression vector comprising the polynucleotide. In another aspect, the disclosure also features a host cell that comprises the polynucleotide. In another aspect, the disclosure also features a host cell that comprises the expression vector.

[0056] In another aspect, the disclosure also features an expression vector comprising the polynucleotide that comprises a nucleic acid sequence encoding a heavy chain of an anti-tumor antibody described herein and the polynucleotide that comprises a nucleic acid sequence encoding a light chain of an anti-tumor antibody described herein. In another aspect, the disclosure also features a host cell that comprises the expression vector.

[0057] In another aspect, the disclosure also features a host cell that comprises two polynucleotides, one polynucleotide comprising a polynucleotide comprising a nucleic acid sequence encoding a heavy chain of an anti-tumor antibody described herein, and another polynucleotide comprising a nucleic acid sequence encoding a light chain of an anti-tumor antibody described herein.

[0058] In another aspect, the disclosure also features a host cell that comprises two expression vectors, one expression vector comprising a polynucleotide comprising a nucleic acid sequence encoding a heavy chain of an anti-tumor antibody described herein, and another expression vector comprising a polynucleotide comprising a nucleic acid sequence encoding a light chain of an anti-tumor antibody described herein.

[0059] In some embodiments, the host cell described herein is a CHO cell, e.g., a CHO-K1 cell.

[0060] In another aspect, the disclosure features a method of producing an antibody described here. The method comprises culturing a host cell described herein under conditions in which the polynucleotide encoding the heavy chain and the polynucleotide encoding the light chain are expressed.

[0061] In another aspect, the disclosure features a method of producing an antibody described herein. The method comprises culturing a host cell that has a polynucleotide comprising a nucleic acid sequence encoding a heavy chain of an anti-tumor antibody described herein and a host cell that has a polynucleotide comprising nucleic acid sequence encoding a light chain of an anti-tumor antibody described herein together under conditions in which the polynucleotide encoding the heavy chain and the polynucleotide encoding the light chain are expressed from their respective host cells.

[0062] In another aspect, the disclosure features a method of producing an antibody described herein. The method comprises culturing a host cell that has an expression vector that comprises a polynucleotide comprising a nucleic acid sequence encoding a heavy chain of an anti-tumor antibody described herein and another host cell that has an expression vector that comprises a polynucleotide comprising a nucleic acid sequence encoding a light chain of an anti-tumor antibody described herein together under conditions in which the polynucleotide encoding the heavy chain and the polynucleotide encoding the light chain are expressed from their respective host cells.

[0063] In any of the methods of producing an antibody described herein, in some embodiments, the host cell is a CHO cell, e.g., a CHO-K1 cell. In some embodiments, the method further comprises purifying the antibody.

### BRIEF DESCRIPTION OF THE DRAWINGS

[0064] FIGS. 1A-1D show tumor growth data from a screen of a pool of antibodies (4 antibodies, each obtained from a lung cancer patient) and lead antibody identified in the screen in combination with an anti-PD-1 antibody. Panel 1A, PBS control; Panel 1B, anti-PD1 antibody only; Panel 1C, anti-PD1 plus antibody pool; Panel 1D, combination of anti-PD1 antibody and AIP-192482 (lead antibody).

[0065] FIGS. 2A and 2B provide data showing the effects of administration of lead antibody and variants on tumor growth in the EMT6 mouse tumor model.

[0066] FIGS. 3A and 3B provide data showing the effects of administration of initial lead antibody and variants on survival in the EMT6 mouse tumor model.

[0067] FIGS. 4A and 4B provide normalized area above the curve (NAAC) tumor volume data for lead antibody and variants in the EMT6 mouse tumor model.

[0068] FIGS. 5A-5D provide data showing the effects of administration of lead antibody and variants on tumor growth in the EMT6 mouse tumor model.

[0069] FIGS. 6A, 6AA, 6B and 6BB show survival data in the EMT6 tumor model comparing lead antibody and variants to control.

[0070] FIGS. 7A-7B provide NAAC data obtained for initial lead antibody and variants tested in the EMT6 mouse tumor model.

[0071] FIG. 8 summarizes the design of a study to test individual variants as monotherapies and in combination with an anti-PD-1 antibody in the EMT-6 mouse tumor model.

[0072] FIG. 9 shows monotherapy survival data for the initial lead antibody and two variants tested in the study summarized in FIG. 8.

[0073] FIG. 10 provides monotherapy tumor growth data for the initial lead antibody and two variants tested in the study summarized in FIG. 8.

[0074] FIG. 11 provides monotherapy survival probability data for the initial lead antibody and two variants tested in the study summarized in FIG. 8.

[0075] FIG. 12 provides monotherapy tumor volume data for the initial lead antibody and two variants tested in the study summarized in FIG. 8.

[0076] FIG. 13 provides combination therapy tumor growth data for the initial lead antibody and two variants tested in combination with an anti-PD1 antibody in the study summarized in FIG. 8.

[0077] FIG. 14 provides combination therapy survival probability data for the initial lead antibody and two variants tested in combination with an anti-PD1 antibody in the study summarized in FIG. 8.

[0078] FIG. 15 provides combination therapy tumor volume data for the initial lead antibody and two variants tested in combination with an anti-PD1 antibody in the study summarized in FIG. 8.

[0079] FIG. 16 provides tumor growth data for the initial lead antibody and two variants in the CT26 mouse model.

[0080] FIG. 17 provides survival probability data for the initial lead antibody and two variants tested in the CT26 mouse model.

[0081] FIG. 18 provides tumor volume data for the initial lead antibody and two variants tested in the CT26 mouse model.

[0082] FIG. 19 provides immunohistochemical binding data showing binding of variant antibodies AIP-157397 and AIP-165430 to tumor and tumor adjacent tissue (TAT).

[0083] FIG. 20 provides immunohistochemical binding data showing binding of variant AIP-106042 to tumor tissue.

[0084] FIG. 21 provides immunohistochemical binding data showing binding of variant AIP-100196 to tumor tissue.

[0085] FIG. 22 provides immunohistochemical binding data showing binding of the lead candidate and variants, including antibodies AIP-192482, AIP-160470, AIP-133645, AIP-158623, AIP-155066, AIP-136538, AIP-166120, AIP-187893, AIP-142079, AIP-184490, and AIP-104188, to estrogen receptor-positive breast tumor tissue and TAT.

[0086] FIGS. 23A-23C provide immunohistochemical data showing binding of initial lead antibody (FIG. 23A), variant AIP-133645 (FIG. 23B), and variant AIP-160470 (FIG. 23C) to tissue from tumors arising from human lung A549 cells, human pancreas BXPC3 cells, human colon cancer Colo-205 cells, or human prostate cancer PC3 cells; and tumor arising from mouse colon, breast, lung, or kidney cancer cell lines.

[0087] FIG. 24 provides immunohistochemical data showing immune cell infiltration in tumors following treatment with an anti-PD-1 antibody, the initial lead antibody, or the combination of the two antibodies.

[0088] FIG. 25 provides a schematic of an ex vivo binding assay to determine correlation with in vivo anti-tumor activity.

[0089] FIG. 26 provides data showing binding of variants to EMT6 ex vivo cells in correlation with in vivo data.

[0090] FIG. 27 provides data showing that binding of variants to ex vivo EMT6 cells correlates with in vivo outcome. C=a control anti-EGFR antibody

[0091] FIG. 28 provides the results of an SDS-PAGE analysis of protein immunoprecipitated with AIP-192482.

[0092] FIG. 29 provides the results of an analysis of AIP-192482-target complex immunoprecipitates treated with RNase or DNase.

[0093] FIG. 30 shows the results of SDS PAGE analysis of immunoprecipitation using lysate from unlabelled A549 cells s incubated with AIP-192482-conjugated M-280 beads and then crosslinked.

[0094] FIG. 31 shows gel filtration purification of AIP-192482-antigen complex with and without RNase treatment and SDS PAGEe analysis of column fractions.

[0095] FIG. 32A-D show results of immunofluorescence imaging experiments showing an extensive overlap between AIP-192482 signal and signal for G3BP, a marker of stress granules. The results also show that although a subset of these G3BP-positive structures, i.e., very small puncta, are not positive for AIP-192482 immunoreactivity, in larger aggregates, which are more heterogeneous in structure, the reactivity co-locates.

[0096] FIG. 33A-D show results of a confocal imaging experiment performed on an EMT6 tumor tissue. A spherical object (indicated by the dotted rectangle) of about 4 μm in diameter was highlighted with fluorescent staining, indicating that it reacted on its surface with AIP-160470 and has CD9 reactivity in its lumen. CD9 is a tetraspannin, which has been reported to be a marker of extracellular vesicles. FIG. 33B-D are higher magnification images of certain areas within the image of FIG. 33A, taken in each case from one plane of a three-dimensional reconstruction. The confocal imaging three-dimensional reconstruction results show that the AIP-160470 reactivity is clearly extracellular in nature, supporting the conclusions of the flow cytometry data shown in FIGS. 35A and 35B.

[0097] FIG. 34A-34D show results of confocal imaging experiments performed on a human breast carcinoma tissue. The images show a mass of CD9-positive vesicles of about 1 μm diameter embedded in signal from AIP-160470 (indicated by white arrows). FIG. 34B-D are higher magnification images of certain areas within the image of FIG. 34A, taken in each case from one plane of a three-dimensional reconstruction. The confocal imaging three-dimensional reconstruction results show that the mass of CD9-positive vesicles is external to nearby cells.

[0098] FIGS. 35A and 35B show flow cytometry analysis of EMT6 cells stained with AIP-192482 and AIP-160470 after being treated with chemotherapeutic agent doxorubicin (“DOX”) for 16 hours in vitro. Geometric mean fluorescence corresponding to the binding of antibodies to the EMT6 cells detected by flow cytometry were plotted against concentrations of the DOX used to treat the EMT6 cells. The results show that the DOX induced surface reactivity over time for AIP-192482 and AIP-160470 in EMT6 cells. These data complement the data in FIG. 33A-D that show growth of EMT6 cells in vivo also induces such surface reactivity.

[0099] FIG. 36 shows surface reactivity induced by both doxorubicin (“DOX”) and cisplatin (“CDDP”) in EMT6 cells.

[0100] FIGS. 37A, 37AA, 37B and 37BB. Kabat, Chothia, and IMGT numbering of AIP-160470. FIGS. 37A and 37AA disclose SEQ ID NO: 94. FIGS. 37B and 37BB disclose SEQ ID NO: 123.

[0101] FIGS. 38A and 38B. FIGS. 38A and 38B provide data showing that RNA is preferentially immunoprecipitated by AIP-192482. Immunoprecipitation from A549 lysates was performed and bound RNA was extracted with Trizol then purified using a Zymo Quick-RNA Miniprep kit. Following purification, RNA was quantified via Qubit and analyzed on an Agilent Bioanalyzer 2100 with the RNA 6000 pico assay. RNA was then processed for sequencing using the NEBNext Ultra II RNA Library Prep Kit for Illumina and sequenced on an Illumina MiSeq with a V3 600 cycle (2×300 PE) sequencing kit. Reads were filtered for quality using AfterQC, then aligned to human genome hg19 using TopHat and mapped reads were quantified using featureCounts.

[0102] FIG. 39A-F show variant activity in an in vitro FcR engagement assay.

[0103] FIG. 40 lists variants selected for Round 1 in vivo study.

[0104] FIG. 41 lists variants selected for Round 2 in vivo study. FIG. 41 discloses SEQ ID NOS 20 and 22-26, respectively, in order of appearance.

[0105] FIG. 42 shows the study design for in vivo activity.

[0106] FIG. 43 provides data showing the tumor volume across cohorts at randomization in Round 2.

[0107] FIG. 44 shows the anti-tumor effects of variants in Round 2, ranked by median Survival.

[0108] FIG. 45 shows antibodies that exhibited the most efficacious responses in Round 2, as ranked by NAAC effect size.

[0109] FIG. 46 shows antibodies that exhibited the most efficacious responses in Round 2, ranked by NGRM effect size.

[0110] FIG. 47 shows antibodies that elicited the most complete responses in Round 2.

[0111] FIG. 48 shows antibodies that exhibited the most durable responses in Round 2

[0112] FIG. 49 provides a summary of the in vivo activity of a subset of variant antibodies having anti-tumor effects is provided in FIG. 49. FIG. 49 discloses SEQ ID NO: 23.

[0113] FIGS. 50A and 50 B show the relationship between in vitro Fc-gamma receptor assay results and in vivo activity

[0114] FIG. 51 shows a schematic of the ATRC-101 sequence variants generated during discovery and for pharmacological evaluation of ATRC-101. Numbers are AIP numbers indicating the Fv variants: 192482=AIP-192482, 133645=AIP-133645, 160470=AIP-160470. Fc=fragment crystallizable; Fv=variable fragment; hIgG1=human immunoglobulin G, subclass 1; IRC™=Immune Repertoire Capture®; mIgG1=mouse immunoglobulin G, subclass 1; mIgG2a=mouse immunoglobulin G, subclass 2a, mIgG3=mouse immunoglobulin G, subclass 3; N297A=asparagine to alanine modification at position 297. ATRC-101 is a fully human immunoglobulin G, subclass 1 (IgG1)/lambda antibody that comprises the V_{H} and V_{L} regions of AIP-160470.

[0115] FIG. 52 shows results of expression analysis of ATRC-101 binding on colorectal Cancer, Triple Negative Breast Cancer, and Melanoma by Immunofluorescence. The binding of the chimeric antibody AIP-160470-mIgG2a to formalin-fixed paraffin-embedded tumor and tumor adjacent tissue from CRC, TNBC, and melanoma. Binding was assessed using 10 μg/mL Alexa Fluor 647-conjugated AIP-160470 mIgG2a by standard immunofluorescence methodology and compared to Alexa Fluor 647-conjugated mIgG2a isotype control monoclonal antibody. Tissues were counterstained with Hoechst. Signals detected by AIP-160470-mIgG2a or isotype are shown in red/magenta and nuclei are labeled in blue. H&E staining from an adjacent section is shown. Red line in H&E staining indicates 50 Adeno=adenocarcinoma; CRC=colorectal cancer; H&E=hematoxylin and eosin; μg=microgram; mIgG2a=mouse immunoglobin G, subclass 2a; TNBC=triple negative breast cancer

[0116] FIG. 53 shows the effect of nuclease pre-treatment on the binding of the chimeric antibody AIP-160470-mIgG2a to human ER+breast carcinoma tissues. Fresh frozen tissue sections were pretreated with indicated concentrations of RNase A, RNase H, or DNase I. Sections were washed, fixed in paraformaldehyde, and blocked before staining with 20 μg/mL Alexa Fluor 647-conjugated AIP-160470-mIgG2a and anti-E-Cadherin or Alexa Fluor 647-conjugated mIgG2a and rabbit IgG isotype control antibodies. Slides were incubated with Alexa Fluor 488-conjugated secondary anti-rabbit antibody. Sections were washed and counterstained with Hoechst. AIP-160470-mIgG2a is shown as red/magenta, E-Cadherin as shown in green, and yellow indicates co-localization of AIP-160470-mIgG2a and E Cadherin. Nuclei are labeled in blue. Images were captured using a Axio Scan automated slide scanner (Zeiss). H&E staining from an adjacent section is shown. White line in black inset indicates 50 DNase=deoxyribonuclease; E-Cad=E-cadherin; ER+=estrogen receptor positive; H&E=hematoxylin and eosin; μg=microgram; mIgG2a=mouse immunoglobulin G, subclass 2a; mL=milliliter; NSCLC=non-small cell lung cancer; RNase=ribonuclease; U=unit(s).

[0117] FIGS. 54A and 54B show distribution of chimeric antibody AIP-160470-mIgG2a immunoreactivity and human PABPC-1 in normal tissues and human carcinoma by immunofluorescence. The images show the distribution of chimeric antibody AIP-160470-mIgG2a immunoreactivity in human small intestine adenocarcinoma (FIG. 39A) and representative normal cerebrum, cerebellum, heart, lung, liver, kidney, pancreas, stomach, and spleen tissues from a study of two FFPE TMAs (FDA808J-1 and FDA808J-2; FIG. 39B). Sections were stained using 1.25 μg/mL Alexa Fluor 647-conjugated chimeric antibody AIP-160470-mIgG2a. Adjacent sections were incubated with a rabbit polyclonal PABPC-1 antibody detected with an anti-rabbit secondary antibody conjugated to Alexa Fluor 647 or H&E stain. FFPE=formalin-fixed paraffin-embedded; H&E=hematoxylin and eosin; μg=microgram; mIgG2a=mouse immunoglobulin G, subclass 2a; mL=milliliter; PABPC-1=cytoplasmic polyadenylate-binding protein 1; RabIgG=rabbit immunoglobulin G; TMA=tissue microarray.

[0118] FIGS. 55A and 55B show dose-dependent tumor growth inhibition by ATRC-101 and the chimeric antibody AIP-160470-mIgG2a in the EMT6-BALB/c syngeneic mouse tumor model. BALB/c mice were inoculated with 1×10⁶ EMT6 tumor cells and dosed IP twice weekly with indicated doses of chimeric antibody MFC-042 (AIP-160470-mIgG2a; FIG. 41A) or the ATRC-101 (FIG. 41 B), when group MTV reached 112 to 113 mm³ and 108 mm³, respectively. Shown are the mean and standard error of the mean for each treatment group (15 animals/group). IP=intraperitoneally; kg=kilogram; mg=milligram; MTV=mean tumor volume.

[0119] FIG. 56 shows impact of Fc-effector function on anti-tumor efficacy of chimeric variants of parental antibody AIP-192482 in the EMT6-BALB/c syngeneic mouse tumor model. BALB/c mice were inoculated with 1×10⁶ EMT6 tumor cells and randomized to treatment groups 6 days later. Starting 7 days post EMT6 inoculation, with a group average mean tumor volume of 94.5 mm³, mice were dosed IP twice weekly with 10 mg/kg of AIP-192482-mIgG2a, AIP-192482-mIgG1, AIP-192482-mIgG3, or AIP-192482-mIgG2a-N297A chimeric variants of the parental antibody AIP-192482 or vehicle (phosphate-buffered saline). The tumor volumes of individual animals from each treatment group are shown (20 animals per group). For treatment groups with CR, the ratio of mice with CR to total animals per group is shown. CR=complete tumor regression; IP=intraperitoneal(ly); kg=kilogram; mg=milligram; mIgG1=mouse immunoglobulin G, subclass 1; mIgG2a=mouse immunoglobulin G, subclass 2a; mIgG3=mouse immunoglobulin G, subclass 3; N297A=asparagine to alanine modification at position 297; mm=millimeter.

[0120] FIG. 57 shows anti-tumor efficacy of chimeric parental antibody AIP-192482 and Sequence-optimized variants in the EMT6-BALBc syngeneic mouse tumor model, study EFF-016. In study EFF-016, BALB/c mice were inoculated with 1×10⁶ EMT6 tumor cells and randomized to treatment groups (20 animals per group) 6 days later. Starting 7 days post EMT6 inoculation (group average tumor volume of 156 mm³), mice were dosed IP twice weekly with indicated doses of chimeric parental antibody AIP-192482-mIgG2a, chimeric sequence-optimized variant AIP-133645-mIgG2a, chimeric antibody AIP-160470-mIgG2a, or vehicle (DPBS). Shown are the tumor volumes of individual mice in each treatment group through Day 53. DPBS=Dulbecco's phosphate-buffered saline; IP=intraperitoneally; mIgG2a=mouse immunoglobulin G, subclass 2a; mm=millimeter.

[0121] FIGS. 58A and 58B show the anti-tumor efficacy of chimeric parental antibody AIP-192482-mIgG2a and Sequence-optimized variants in the EMT6-BALBc syngeneic mouse tumor model, study EFF-020. In study EFF-020, BALB/c mice were inoculated with 1×10⁶ EMT6 tumor cells and randomized to treatment groups (20 animals per group) 6 days later, when the group average tumor volume was approximately 10⁴ mm³. Mice were dosed IP twice weekly with 5 mg/kg or 10 mg/kg of chimeric parental antibody AIP-192482-mIgG2a, 2.5 mg/kg or 5 mg/kg of chimeric antibody AIP-160470-mIgG2a, or vehicle (DPBS) starting on Day 7 for a total of 7 doses. Mice were also dosed IP with 10 mg/kg anti-mouse PD-1 monoclonal antibody or vehicle (DPBS) twice weekly starting on Day 7 for a total of 4 doses. In the monotherapy groups, vehicle was administered according to the dosing schedule of the absent test article. FIG. 44A shows the tumor volumes of individual mice in AIP-192482-mIgG2a treatment groups and control groups through Day 35. FIG. 44B shows the tumor volumes of individual mice in AIP-160470-mIgG2a treatment groups and control groups through Day 35. CR=complete tumor regression; DPBS=Dulbecco's phosphate-buffered saline; IP=intraperitoneally; kg=kilogram; mg=milligram; mIgG2a=mouse immunoglobulin G, subclass 2a; mm=millimeter; PD-1=programmed death receptor 1.

[0122] FIGS. 59A and 59B show the anti-tumor efficacy of chimeric parental antibody AIP-192482-mIgG2a in the CT26-BALBc syngeneic mouse tumor model, Study EFF-039. In study EFF-039, BALB/c mice were inoculated with 1×10⁶ CT26 tumor cells and randomized to treatment groups 6 days later. Starting 7 days post CT26 inoculation (group average tumor volume of approximately 145 mm³), mice were dosed IP three times per week with 20 mg/kg of chimeric parental antibody AIP-192482-mIgG2a (40 animals) or vehicle (DPBS; 20 animals). FIG. 45A shows the tumor volumes of individual mice in each treatment group through Day 35. FIG. 45B shows the tumor volumes for treatment groups dosed with AIP-192482-mIgG2a through Day 97. The number of CR through Day 97 are indicated. DPBS=Dulbecco's phosphate-buffered saline; IP=intraperitoneally; kg=kilogram; mg=milligram; mIgG2a=mouse immunoglobulin G, subclass 2a; mm=millimeter

[0123] FIG. 60 shows the anti-Tumor Efficacy of Antibody AIP-192482-mIgG2a Alone or In Combination with PD-1 Blockade in the E0771-C57BL/6 syngeneic mouse tumor model, Study EFF-006. In study EFF-006, C57BL/6 mice were inoculated with 1×10⁶E0771 tumor cells and randomized to treatment groups of 20 animals per group 8 days later, when the group average tumor volume was approximately 104 mm3. Starting 9 days post E0771 inoculation, mice were dosed IP twice weekly through Day 30 with 20 mg/kg of chimeric, parental antibody AIP-192482-mIgG2a or vehicle (DPBS). In addition, mice were dosed IP twice weekly with 2.5 mg/kg anti-mouse PD-1 monoclonal antibody or vehicle (DPBS) twice weekly starting on Day 9. In the monotherapy groups, vehicle was administered according to the dosing schedule of the absent test article. Shown are tumor volumes of individual mice in each treatment group through Day 35. The number of CRs in each treatment group are indicated.

CR=complete tumor regression; DPBS=Dulbecco's phosphate-buffered saline; IP=intraperitoneally; kg=kilogram; mg=milligram; mIgG2a=mouse immunoglobulin G, subclass 2a; mm=millimeter; PD-1=programmed death receptor 1.

[0124] FIG. 61 shows assessment of T Cell Requirement for Anti-tumor Efficacy in the EMT6-BALBc Syngeneic Mouse Tumor Model, Study TMD04. In study TMD04, BALB/c mice were inoculated with 1×10⁶ EMT6 cells and dosed IP with DPBS or anti-mouse CD8a antibody, clone 2.43 (BioXCell), three times weekly starting on Day 6. Chimeric parental antibody AIP-192482-mIgG2a or vehicle (DPBS) was dosed IP at 10 mg/kg twice weekly starting on Day 7 (10 animals per group). Shown are the individual tumor volumes through Day 27. DPBS=phosphate-buffered saline; IP=intraperitoneal(ly); mIgG2a=mouse immunoglobulin G, subclass 2a

[0125] FIGS. 62A and 62B show that Assessment of CD8+ T Cells and M1-Polarization of Macrophages in EMT6 Tumors In Vivo following Treatment with Chimeric Parental Antibody AIP-192482-mIgG2a. BALB/c mice with established EMT6 tumors were dosed with vehicle (DPBS) or 20 mg/kg of chimeric parental antibody AIP-192482-mIgG2a on Days 7, 10, 14 as part of anti-tumor study EFF-004. EMT6 tumors were harvested from representative mice on study Day 15. Samples were sectioned and stained with anti-CD8 or anti-iNOS antibodies by tyramide signaling amplification immunofluorescence methodology. FIG. 48A shows representative tumor sections stained from animals treated with DPBS or AIP-192482-mIgG2a for the presence of CD8+ T cells or iNOS+ macrophages (green). The inset shows H&E staining from an adjacent section. White lines on black background indicates 50 μm. FIG. 48B shows the proportion of CD8+(5 animals) and iNOS+ cells (10 animals) following DPBS or AIP-192482-mIgG2a administration. Significance was assessed by unpaired t-test, with *=p<0.05; **=p<0.01. DPBS=Dulbecco's phosphate-buffered saline; H&E=hematoxylin and eosin; iNOS=inducible nitric oxide synthase; mIgG2a=mouse immunoglobulin G, subclass 2a; PBS=Dulbecco's phosphate-buffered saline

[0126] FIG. 63 shows the serum concentrations in Cynomolgus Monkey following Single Dose Intravenous Administration of ATRC-101 (Study ATRC-101.PK.18.01). Male and female cynomolgus monkeys were given one intravenous bolus injections of 1 mg/kg, 10 mg/kg, or 30 mg/kg ATRC-101. Blood samples were collected 5 minutes and 1, 4, 8, 12, 24, 48, 96, 168, 240, 336, 504, and 672 hours post dose. Shown are the ATRC-101 blood serum concentrations measured by ELISA. ELISA=enzyme-linked immunosorbent assay.

[0127] FIG. 64 shows Serum Concentrations in Cynomolgus Monkey Following Repeat Dose Administration of ATRC-101 (Study ATRC-101.TX.18.01). Male and female cynomolgus monkeys were given once weekly administration via IV infusion at 10 mg/kg, 30 mg/kg, or 100 mg/kg ATRC-101 for a total of 4 doses. Blood samples were collected 15 minutes and 1, 4, 8, 12, 24, 48, 96, and 168 hours after the first and last dose and ATRC-101. Shown are the ATRC-101 blood serum concentrations measured by ELISA.

### DETAILED DESCRIPTION OF THE INVENTION

### Terminology

[0128] As used in herein, the singular forms “a”, “an” and “the” include plural referents unless the content clearly dictates otherwise. Thus, for example, reference to “an antibody” optionally includes a combination of two or more such molecules, and the like.

[0129] The term “about” as used herein refers to the usual error range for the respective value readily known to the skilled person in this technical field, for example ±20%, ±10%, or ±5%, are within the intended meaning of the recited value.

[0130] As used herein, the term “antibody” means an isolated or recombinant binding agent that comprises the necessary variable region sequences to specifically bind an antigenic epitope. Therefore, an “antibody” as used herein is any form of antibody of any class or subclass or fragment thereof that exhibits the desired biological activity, e.g., binding a specific target antigen. Thus, it is used in the broadest sense and specifically covers a monoclonal antibody (including full-length monoclonal antibodies), human antibodies, chimeric antibodies, nanobodies, diabodies, multispecific antibodies (e.g., bispecific antibodies), and antibody fragments including but not limited to scFv, Fab, and the like so long as they exhibit the desired biological activity.

[0131] “Antibody fragments” comprise a portion of an intact antibody, for example, the antigen-binding or variable region of the intact antibody. Examples of antibody fragments include Fab, Fab′, F(ab′)2, and Fv fragments; diabodies; linear antibodies (e.g., Zapata et al., Protein Eng. 8(10): 1057-1062 (1995)); single-chain antibody molecules (e.g., scFv); and multispecific antibodies formed from antibody fragments. Papain digestion of antibodies produces two identical antigen-binding fragments, called “Fab” fragments, each with a single antigen-binding site, and a residual “Fc” fragment, a designation reflecting the ability to crystallize readily. Pepsin treatment yields an F(ab′)2 fragment that has two antigen combining sites and is still capable of cross-linking antigen.

[0132] A “tumor-binding antibody” as used herein refers to an antibody that binds tumor tissue. In one embodiment, the tumor-binding antibody binds the tumor tissue through a binding interaction with an extracellular RNA-protein complex. “Extracellular RNA-protein complex” refers to a complex that is detected on the outside of tumor cells. The complex need not be integrated into the external surface of the cells, but in some embodiments, may be associated with the outside of the tumor cells as a conglomeration or aggregate of RNA and protein molecules interacting with the cell membrane, or otherwise present outside of the tumor cell. Although the extracellular RNA-protein complex is external to tumor cells, it may additionally be present internally in a cell. A “tumor-binding antibody” of the present disclosure exhibits preferential binding to tumor tissue compared to tumor-adjacent tissue (TAT), e.g., specific signal above noise is noted with enhanced reactivity apparent in tumor vs adjacent tissues. In some embodiments the tumor-binding antibody is an “anti-tumor antibody” that decreases rate of tumor growth, tumor size, invasion, and/or metastasis, via direct or indirect effects on tumor cells.

[0133] As used herein, “V-region” refers to an antibody variable region domain comprising the segments of Framework 1, CDR1, Framework 2, CDR2, and Framework 3, including CDR3 and Framework 4. The heavy chain V-region, V_{H}, is a consequence of rearrangement of a V-gene (HV), a D-gene (HD), and a J-gene (HJ), in what is termed V(D)J recombination during B-cell differentiation. The light chain V-region, V_{L}, is a consequence of rearrangement of a V-gene (LV) and a J-gene (LJ).

[0134] As used herein, “complementarity-determining region (CDR)” refers to the three hypervariable regions (HVRs) in each chain that interrupt the four “framework” regions established by the light and heavy chain variable regions. The CDRs are the primary contributors to binding to an epitope of an antigen. The CDRs of each chain are referred to as CDR1, CDR2, and CDR3, numbered sequentially starting from the N-terminus, and are also identified by the chain in which the particular CDR is located. Thus, for example, a V_{H} CDR3 (HCDR3) is located in the variable domain of the heavy chain of the antibody in which it is found, whereas a V_{L} CDR3 (LCDR3) is the CDR3 from the variable domain of the light chain of the antibody in which it is found. The term “CDR” is used interchangeably with “HVR” in this application when referring to CDR sequences.

[0135] The amino acid sequences of the CDRs and framework regions can be determined using various well known definitions in the art, e.g., Kabat, Chothia, international ImMunoGeneTics database (IMGT), and AbM (see, e.g., Chothia & Lesk, 1987, Canonical structures for the hypervariable regions of immunoglobulins. J. Mol. Biol. 196, 901-917; Chothia C. et al., 1989, Conformations of immunoglobulin hypervariable regions. Nature 342, 877-883; Chothia C. et al., 1992, structural repertoire of the human VH segments J. Mol. Biol. 227, 799-817; Al-Lazikani et al., J. Mol. Biol 1997, 273(4)). Definitions of antigen combining sites are also described in the following: Ruiz et al., IMGT, the international ImMunoGeneTics database. Nucleic Acids Res., 28, 219-221 (2000); and Lefranc, M.-P. IMGT, the international ImMunoGeneTics database. Nucleic Acids Res. January 1; 29(1):207-9 (2001); MacCallum et al, Antibody-antigen interactions: Contact analysis and binding site topography, J. Mol. Biol., 262 (5), 732-745 (1996); and Martin et al, Proc. Natl Acad. Sci. USA, 86, 9268-9272 (1989); Martin, et al, Methods Enzymol., 203, 121-153, (1991); Pedersen et al, Immunomethods, 1, 126, (1992); and Rees et al, In Sternberg M. J. E. (ed.), Protein Structure Prediction. Oxford University Press, Oxford, 141-172 1996). Reference to CDRs as determined by Kabat numbering are based, for example, on Kabat et al., Sequences of Proteins of Immunological Interest, 5th Ed. Public Health Service, National Institute of Health, Bethesda, Md. (1991)). Chothia CDRs are determined as defined by Chothia (see, e.g., Chothia and Lesk J. Mol. Biol. 196:901-917 (1987)).

[0136] An “Fc region” refers to the constant region of an antibody excluding the first constant region immunoglobulin domain. Thus, e.g., for human immunoglobulins, “Fc” refers to the last two constant region immunoglobulin domains of IgA, IgD, and IgG, and the last three constant region immunoglobulin domains of IgE and IgM, and the flexible hinge N-terminal to these domains. For IgA and IgM Fc may include the J chain. For IgG, Fc comprises immunoglobulin domains Cγ2 and Cγ3 and the hinge between Cγ1 and Cγ. It is understood in the art that the boundaries of the Fc region may vary, however, the human IgG heavy chain Fc region is usually defined to comprise residues C226 or P230 to its carboxyl-terminus, using the numbering according to the EU index as in Kabat et al. (1991, NIH Publication 91-3242, National Technical Information Service, Springfield, Va.). The term “Fc region” may refer to this region in isolation or this region in the context of an antibody or antibody fragment. “Fc region” includes naturally occurring allelic variants of the Fc region as well as modified Fc regions, e.g., that are modified to modulate effector function or other properties such as pharmacokinetics, stability or production properties of an antibody. Fc regions also include variants that do not exhibit alterations in biological function. For example, one or more amino acids can be deleted from the N-terminus or C-terminus of the Fc region of an immunoglobulin without substantial loss of biological function. Such variants can be selected according to general rules known in the art so as to have minimal effect on activity (see, e.g., Bowie, et al., Science 247:306-1310, 1990). For example, for IgG4 antibodies, a single amino acid substitution (S228P according to Kabat numbering; designated IgG4Pro) may be introduced to abolish the heterogeneity observed in recombinant IgG4 antibody (see, e.g., Angal, et al., Mol Immunol 30:105-108, 1993).

[0137] An “EC₅₀” as used herein in the context of an Fc receptor engagement assay, refers to the half maximal effective concentration, which is the concentration of an antibody that induces a response (signal generated in engagement assay) halfway between the baseline and maximum after a specified exposure time. Fc receptor engagement assays are further described herein in the “Variant Binding Activity” section. In some embodiments, the “fold over EC50” is determined by dividing the EC50 of a reference antibody by the EC₅₀ of the test antibody.

[0138] The term “equilibrium dissociation constant” abbreviated (K_{D}), refers to the dissociation rate constant (k_{d}, time⁻¹) divided by the association rate constant (kₐ, time⁻¹ M⁻¹). Equilibrium dissociation constants can be measured using any method. Thus, in some embodiments antibodies of the present disclosure have a K_{D} of less than about 50 nM, typically less than about 25 nM, or less than 10 nM, e.g., less than about 5 nM or than about 1 nM and often less than about 10 nM as determined by surface plasmon resonance analysis using a biosensor system such as a Biacore® system performed at 37° C. In some embodiments, an antibody of the present disclosure has a K_{D} of less than 5×10⁻⁵M, less than 10⁻⁵M, less than 5×10⁻⁶ M, less than 10⁻⁶ M, less than 5×10⁻⁶ M, less than 10⁻⁶ M, less than 5×10⁻⁸M, less than 10⁻⁸ M, less than 5×10⁻⁹M, less than 10⁻⁶ M, less than 5×10⁻¹⁰ M, less than 10⁻¹⁰ M, less than 5×10⁻¹¹ M, less than 10⁻¹¹ M, less than 5×10⁻¹² M less than 10⁻¹²M, less than 5×10⁻¹³M, less than 10⁻¹³ M, less than 5×10⁻¹⁴ M, less than 10⁻¹⁴M, less than 5×10⁻¹⁵M, or less than 10⁻¹⁵M or lower as measured as a bivalent antibody. In the context of the present invention, an “improved” K_{D} refers to a lower K_{D}. In some embodiments, an antibody of the present disclosure has a K_{D} of less than 5×10⁻⁵M, less than 10⁻⁵M, less than 5×10⁻⁶ M, less than 10⁻⁶ M, less than 5×10⁻⁶ M, less than 10⁻⁶ M, less than 5×10⁻⁸M, less than 10⁻⁸M, less than 5×10⁻⁹M, less than 10⁻⁹M, less than 5×10⁻¹⁰ M, less than 10⁻¹⁰ M less than 5×10⁻¹¹M, less than 10⁻¹¹ M, less than 5×10⁻¹²M, less than 10⁻¹² M, less than 5×10⁻¹³ M, less than 10⁻¹³M, less than 5×10⁻¹⁴M, less than 10⁻¹⁴M, less than 5×10⁻¹⁵M, or less than 10⁻¹⁵M or lower as measured as a monovalent antibody, such as a monovalent Fab. In some embodiments, an anti-tumor antibody of the present disclosure has K_{D} less than 100 pM, e.g., or less than 75 pM, e.g., in the range of 1 to 100 pM, when measured by surface plasmon resonance analysis using a biosensor system such as a Biacore® system performed at 37° C. In some embodiments, an anti-tumor antibody of the present disclosure has K_{D} of greater than 100 pM, e.g., in the range of 100-1000 pM or 500-1000 pM when measured by surface plasmon resonance analysis using a biosensor system such as a Biacore® system performed at 37° C.

[0139] The term “monovalent molecule” as used herein refers to a molecule that has one antigen-binding site, e.g., a Fab or scFv.

[0140] The term “bivalent molecule” as used herein refers to a molecule that has two antigen-binding sites. In some embodiments, a bivalent molecule of the present invention is a bivalent antibody or a bivalent fragment thereof. In some embodiments, a bivalent molecule of the present invention is a bivalent antibody. In some embodiments, a bivalent molecule of the present invention is an IgG. In general monoclonal antibodies have a bivalent basic structure. IgG and IgE have only one bivalent unit, while IgA and IgM consist of multiple bivalent units (2 and 5, respectively) and thus have higher valencies. This bivalency increases the avidity of antibodies for antigens.

[0141] The terms “monovalent binding” or “monovalently binds to” as used herein refer to the binding of one antigen-binding site to its antigen.

[0142] The terms “bivalent binding” or “bivalently binds to” as used herein refer to the binding of both antigen-binding sites of a bivalent molecule to its antigen. In some embodiments, both antigen-binding sites of a bivalent molecule share the same antigen specificity.

[0143] The term “valency” as used herein refers to the number of different binding sites of an antibody for an antigen. A monovalent antibody comprises one binding site for an antigen. A bivalent antibody comprises two binding sites for the same antigen.

[0144] The term “avidity” as used herein in the context of antibody binding to an antigen refers to the combined binding strength of multiple binding sites of the antibody. Thus, “bivalent avidity” refers to the combined strength of two binding sites.

[0145] The terms “identical” or percent “identity,” in the context of two or more polypeptide sequences, refer to two or more sequences or subsequences that are the same or have a specified percentage of amino acid residues that are the same (e.g., at least 70%, at least 75%, at least 80%, 85%, 90%, 91%, 92%, 93%, 94%, 95%, 96%, 97%, 98%, 99%, or higher) identity over a specified region, e.g., the length of the two sequences, when compared and aligned for maximum correspondence over a comparison window or designated region. Alignment for purposes of determining percent amino acid sequence identity can be performed in various methods, including those using publicly available computer software such as BLAST, BLAST-2, ALIGN or Megalign (DNASTAR) software. Examples of algorithms that are suitable for determining percent sequence identity and sequence similarity the BLAST 2.0 algorithms, which are described in Altschul et al., Nuc. Acids Res. 25:3389-3402 (1977) and Altschul et al., J. Mol. Biol. 215:403-410 (1990). Thus, for purposes of this invention, BLAST 2.0 can be used with the default parameters to determine percent sequence identity.

[0146] The terms “corresponding to,” “determined with reference to,” or “numbered with reference to” when used in the context of the identification of a given amino acid residue in a polypeptide sequence, refers to the position of the residue of a specified reference sequence when the given amino acid sequence is maximally aligned and compared to the reference sequence. Thus, for example, an amino acid residue in a V_{H} region polypeptide “corresponds to” an amino acid in the V_{H} region of SEQ ID NO:1 when the residue aligns with the amino acid in SEQ ID NO:1 when optimally aligned to SEQ ID NO:1. The polypeptide that is aligned to the reference sequence need not be the same length as the reference sequence.

[0147] A “conservative” substitution as used herein refers to a substitution of an amino acid such that charge, polarity, hydropathy (hydrophobic, neutral, or hydrophilic), and/or size of the side group chain is maintained. Illustrative sets of amino acids that may be substituted for one another include (i) positively-charged amino acids Lys and Arg; and His at pH of about 6; (ii) negatively charged amino acids Glu and Asp; (iii) aromatic amino acids Phe, Tyr and Trp; (iv) nitrogen ring amino acids His and Trp; (v) aliphatic hydrophobic amino acids Ala, Val, Leu and Ile; (vi) hydrophobic sulfur-containing amino acids Met and Cys, which are not as hydrophobic as Val, Leu, and Ile; (vii) small polar uncharged amino acids Ser, Thr, Asp, and Asn (viii) small hydrophobic or neutral amino acids Gly, Ala, and Pro; (ix) amide-comprising amino acids Asn and Gln; and (xi) beta-branched amino acids Thr, Val, and Ile. Reference to the charge of an amino acid in this paragraph refers to the charge at pH 6-7.

[0148] The terms “nucleic acid” and “polynucleotide” are used interchangeably and as used herein refer to both sense and anti-sense strands of RNA, cDNA, genomic DNA, and synthetic forms and mixed polymers of the above. In particular embodiments, a nucleotide refers to a ribonucleotide, deoxynucleotide or a modified form of either type of nucleotide, and combinations thereof. The terms also include, but is not limited to, single- and double-stranded forms of DNA. In addition, a polynucleotide, e.g., a cDNA or mRNA, may include either or both naturally occurring and modified nucleotides linked together by naturally occurring and/or non-naturally occurring nucleotide linkages. The nucleic acid molecules may be modified chemically or biochemically or may contain non-natural or derivatized nucleotide bases, as will be readily appreciated by those of skill in the art. Such modifications include, for example, labels, methylation, substitution of one or more of the naturally occurring nucleotides with an analogue, internucleotide modifications such as uncharged linkages (e.g., methyl phosphonates, phosphotriesters, phosphoramidates, carbamates, etc.), charged linkages (e.g., phosphorothioates, phosphorodithioates, etc.), pendent moieties (e.g., polypeptides), intercalators (e.g., acridine, psoralen, etc.), chelators, alkylators, and modified linkages (e.g., alpha anomeric nucleic acids, etc.). The above term is also intended to include any topological conformation, including single-stranded, double-stranded, partially duplexed, triplex, hairpinned, circular and padlocked conformations. A reference to a nucleic acid sequence encompasses its complement unless otherwise specified. Thus, a reference to a nucleic acid molecule having a particular sequence should be understood to encompass its complementary strand, with its complementary sequence. The term also includes codon-optimized nucleic acids that encode the same polypeptide sequence.

[0149] The term “vector,” as used herein, refers to a nucleic acid molecule capable of propagating another nucleic acid to which it is linked. The term includes the vector as a self-replicating nucleic acid structure as well as the vector incorporated into the genome of a host cell into which it has been introduced. A “vector” as used here refers to a recombinant construct in which a nucleic acid sequence of interest is inserted into the vector. Certain vectors are capable of directing the expression of nucleic acids to which they are operatively linked. Such vectors are referred to herein as “expression vectors”.

[0150] A “substitution,” as used herein, denotes the replacement of one or more amino acids or nucleotides by different amino acids or nucleotides, respectively.

[0151] An “isolated” nucleic acid refers to a nucleic acid molecule that has been separated from a component of its natural environment. An isolated nucleic acid includes a nucleic acid molecule contained in cells that ordinarily contain the nucleic acid molecule, but the nucleic acid molecule is present extrachromosomally or at a chromosomal location that is different from its natural chromosomal location.

[0152] “Isolated nucleic acid encoding an antibody or fragment thereof” refers to one or more nucleic acid molecules encoding antibody heavy or light chains (or fragments thereof), including such nucleic acid molecule(s) in a single vector or separate vectors, and such nucleic acid molecule(s) present at one or more locations in a host cell.

[0153] The terms “host cell,” “host cell line,” and “host cell culture” are used interchangeably and refer to cells into which exogenous nucleic acid has been introduced, including the progeny of such cells. Thus, a host cell is a recombinant host cells and includes the primary transformed cell and progeny derived therefrom without regard to the number of passages.

[0154] A polypeptide “variant,” as the term is used herein, is a polypeptide that typically differs from one or more polypeptide sequences specifically disclosed herein in one or more substitutions, deletions, additions and/or insertions.

[0155] The term “cancer cell” or “tumor cell” as used herein refers to a neoplastic cell. The term includes cells from tumors that are benign as well as malignant. Neoplastic transformation is associated with phenotypic changes of the tumor cell relative to the cell type from which it is derived. The changes can include loss of contact inhibition, morphological changes, and unregulated cell growth,

[0156] “Inhibiting growth of a tumor” and “inhibiting growth of a cancer” as used herein are interchangeable and refer to slowing growth and/or reducing the cancer cell burden of a patient that has cancer. “Inhibiting growth of a cancer” thus includes killing cancer cells, as well as decreasing the rate of tumor growth, tumor size, invasion, and/or metastasis by direct or indirect effects on tumor cells.

[0157] As used herein, “therapeutic agent” refers to an agent that when administered to a patient suffering from a disease, in a therapeutically effective dose, will cure, or at least partially arrest the symptoms of the disease and complications associated with the disease.

Antibodies that Bind to a Tumor

[0158] In one aspect, provided herein are antibodies that bind to tumor tissue through a binding interaction with an extracellular RNA-protein complex. The extracellular-RNA protein complex is further described below in the section entitled “Antibody Binding Target”.

[0159] Heavy and light chain variable region sequences of illustrative tumor-binding antibodies of the present disclosure are provided in Tables 1A and 2A.

[0160] Positions of residues in heavy chain variable regions are specified herein with reference to any one of the V_{H} region sequences (SEQ ID NOS:77-122, 1333-1526, and 1725) of Table 1A and 2A, all of which are 140 amino acids in length.

[0161] Positions of residues in light chain variable regions are specified herein with reference to any one of the 110-amino acid V_{L} region sequences (SEQ ID NOS:123-168, 1527-1720, and 1726) shown in Tables 1A and 2A.

[0162] Position 140, as numbered with respect to V_{H} region sequences presented in Tables 1A and 2A, and position 110 of the V_{L} region sequences presented in Tables 1A and 2A are considered to be the last amino acids of the V_{H} and V_{L} regions, respectively, according to EU index numbering. In a human IgG format (e.g., IgG1, IgG2, IgG3, or IgG4), the subsequent residue is termed the “junction codon”, and is natively encoded by the junction of the final 3′ base of the variable region gene (HJ or LJ) with the first two 5′ bases of the constant region gene (heavy or light), and exhibits amino acid variation due to variation in the final 3′ base of HJ and LJ. The human heavy chain junction codon can natively be Ala, Ser, Pro, or Thr, and is usually an Ala. The human kappa chain junction codon can natively be Arg or Gly, and is usually an Arg. The human lambda chain junction codon can natively be Gly, Ser, Arg, or Cys, and is usually a Ser or Gly.

[0163] CDRs as shown in Table 1B and Table 2B are defined by IMGT and Kabat. The heavy chain CDRs encompass amino acid residues from amino acid residues 26-35 (HCDR1), 50-68 (HCDR2) and 99-129 (HCDR3). The light chain CDRs encompass amino acid residues from amino acid residues 23-35 (LCDR1), 51-57 (LCDR2), and 90-100 (LCDR3). The numbering of the residues correspond to the positions in the V_{H} and V_{L} sequences in Tables 1A and 2A. The V_{H} CDRs as listed in Table 1B and Table 2B are defined as follows: HCDR1 is defined by combining Kabat and IMGT; HCDR2 is defined by Kabat; and the HCDR3 is defined by IMGT. The V_{L} CDRs as listed in Table 1B and Table 2B are defined by Kabat. As known in the art, numbering and placement of the CDRs can differ depending on the numbering system employed. It is understood that disclosure of a variable heavy and/or variable light sequence includes the disclosure of the associated CDRs, regardless of the numbering system employed.

[0164] Using AIP-160470 as a reference sequence, FIG. 37 shows the numbering of the residues in the AIP-160470 V_{H} and V_{L} sequences using IMGT, Kabat, and Chothia numbering systems.

The CDRs as defined using the IMGT numbering system are:
HCDR1: 27-38 (excluding positions 31-34)

### HCDR2: 56-65

[0165] HCDR3: 105-117 (including 18 insertions between 111 and 112)
LCDR1: 27-38 (excluding positions 31-34)
LCDR2: 56-65 (excluding positions 58-64) and
LCDR3: 105-117 (excluding positions 111-112).
Accordingly, the corresponding IMGT CDRs for AIP-160470 are:

HCDR1:
(SEQ ID NO: 1763)
GFTFSKAW
HCDR2:
(SEQ ID NO: 1764)
IKSVTDGETT
HCDR3:
(SEQ ID NO: 21)
TSSFCCRGGSCPSHDTSYCGGQYKSYYYMDV
LCDR1:
(SEQ ID NO: 1765)
SSNIGSSS
LCDR2:
KNN
LCDR3:
(SEQ ID NO: 68)
STWDDSLSVRV.

[0166] The CDRs as defined using the Kabat numbering system are:

### HCDR1: 31-35

[0167] HCDR2: 50-65 (including insertions of 52a, 52b, and 52c)
HCDR3: 95-102 (including insertions of 100a-100u)
LCDR1: 24-34 (including insertions of 27a and 27b)

### LCDR2: 50-56

[0168] LCDR3: 89-97 (including insertions of 95a and 95b).
Accordingly, the corresponding KABAT CDRs for AIP-160470 are:

HCDR1:
(SEQ ID NO: 1766)
KAWMS
HCDR2:
(SEQ ID NO: 9)
RIKSVTDGETTDYAAPVKG
HCDR3:
(SEQ ID NO: 1767)
SFCCRGGSCPSHDTSYCGGQYKSYYYMDV
LCDR1:
(SEQ ID NO: 48)
SGSSSNIGSSSVS
LCDR2:
(SEQ ID NO: 59)
KNNQRPS
LCDR3:
(SEQ ID NO: 68)
STWDDSLSVRV

[0169] The CDRs defined using the Chothia numbering system are:

### HCDR1: 26-32;

[0170] HCDR2: 52-56 (including insertions of 52a, 52b, and 52c)
HCDR3: 95-102 (including insertions of 100a-100u)
LCDR1: 24-34 (including insertions of 30a and 30b)

### LCDR2: 50-56

[0171] LCDR3: 89-97 (including insertions of 95a and 95b.
Accordingly, the corresponding Chothia CDRs for AIP-160470 are:

HCDR1:
(SEQ ID NO: 1768)
GFTFSKA
HCDR2:
(SEQ ID NO: 1769)
KSVTDGET
HCDR3:
(SEQ ID NO: 1767)
SFCCRGGSCPSHDTSYCGGQYKSYYYMDV
LCDR1:
(SEQ ID NO: 48)
SGSSSNIGSSSVS
LCDR2:
(SEQ ID NO: 59)
KNNQRPS
LCDR3:
(SEQ ID NO: 68)
STWDDSLSVRV

### V_{H} Regions

[0172] In some embodiments, a tumor-binding antibody of the present invention that binds to an extracellular RNA-protein complex, e.g., that has activity in an FcγRIIa engagement assay, has one, two, or three CDRs of a V_{H} sequence as shown in Table 1A or Table 2A. In some embodiments, the tumor-binding antibody has at least one mutation and no more than 10, 20, 30, 40 or 50 mutations in the V_{H} amino acid sequences compared to a V_{H} sequence set forth in any one of SEQ ID NOS:77-122 or 1333-1526 or 1725. In some embodiments, the V_{H} amino acid sequence may comprise 1, 2, 3, 4, 5, 6, 7, 8, 9, or 10 amino acid insertions or deletions compared to a V_{H} sequence set forth in any one of SEQ ID NOS:77-122 or 1333-1526 or 1725. In some embodiments, the V_{H} amino acid sequence may comprise a deletion or insertion, e.g., a 1, 2, 3, 4, or 5 amino acid deletions or insertions, relative to a CDR sequence shown in Table 1B or Table 2B. In some embodiments, the V_{H} amino acid sequence may comprise a 1-amino acid or 2-amino acid deletion or insertion relative to a CDR sequence shown in Table 1B or Table 2B. In some embodiments, the V_{H} region comprises a CDR1 having 1 or 2 substitutions relative to a CDR1 sequence of any one of SEQ ID NOS:1-8 or 169-362. In some embodiments, an HCDR1 has 3 or 4 substitutions relative to a CDR1 sequence of any one of SEQ ID NOS:1-8 or 169-362. In some embodiments, the V_{H} region comprises a CDR2 that has 1, 2, 3, or 4 substitutions relative to a CDR2 sequence of any one of SEQ ID NOS:9-19 or 363-556. In some embodiments, the V_{H} region has 5, 6, 7, or 8 substitutions relative to a CDR2 sequence of any one of SEQ ID NOS:9-19 or 363-556. In some embodiments, the V_{H} region comprises a CDR3 that has 1, 2, 3, or 4 substitutions relative to a CDR3 sequence of any one of SEQ ID NOS:20-47 or 557-750 or 1727. In some embodiments, the V_{H} region has 5, 6, 7, or 8 substitutions relative to a CDR3 sequence of any one of SEQ ID NOS:20-47 or 557-750 or 1727. In some embodiments, the V_{H} region has 9, 10, 11, 12, 13, or 14 substitutions relative to a CDR3 of any one of SEQ ID NOS:20-47 or 557-750 or 1727. In some embodiments, a tumor-binding antibody of the present invention comprises a CDR1, CDR2, and CDR3, each having at least 80% identity to a CDR1, CDR2, and CDR3 as shown in Table 1B or 2B In some embodiments, a tumor-binding antibody of the present invention comprises a CDR1, CDR2, and CDR3, each having at least 90% identity to a CDR1, CDR2, and CDR3 as shown in Table 1B or Table 2B. In some embodiments, an anti-tumor antibody of the present invention comprises a CDR1, CDR2, and CDR3 as shown in Table 1B or Table 2B. In some embodiments, a tumor-binding antibody of the present invention comprises an HCDR1, HCDR2, and HCDR3 of an antibody designated as AIP-158623, AIP-155066, AIP-136538, AIP-166120, AIP-133645, AIP-187893, AIP-142079, AIP-160470, AIP-104188, AIP-157397, AIP-165430, AIP-189526, AIP-192482, AIP-122563, or AIP-171142 in Table 1.

[0173] In some embodiments, a V_{H} region of a tumor-binding antibody of the present invention has a solvent exposure of each CDR side chain, in terms of square Angstroms, as specified in this paragraph, based on a Fab crystal structure of an illustrative antibody. Classification as buried, intermediate, or exposed is based on cutoff values as follows: less than about 10 Ang², about 10-50 Ang², or greater than about 50 Ang², respectively. The positions are determined with reference to any one of the V_{H} region sequences provided in Table 1A or Table 2A. Thus, in some embodiments, an anti-tumor antibody of the invention comprises a CDR1 in which positions 26, 27, 28, 29, 30, and 31 are exposed; position 32 is buried; position 33 is exposed; and positions 34 and 35 are intermediate. In some embodiments, an anti-tumor antibody of the invention comprises a CDR2 in which position 50 is intermediate; position 51 is exposed; position 53 is buried; positions 54, 55, 56, 57, 58, 59, and 60 are exposed; position 61 is intermediate; and positions 62, 63, 64, 65, 66, 67, and 68 are exposed. In some embodiments, an anti-tumor antibody of the invention comprises a CDR3 in which position 99 is exposed; position 100 is buried; position 101 is intermediate; positions 102, 103, and 104 are buried; positions 105, 106, 107, and 108 are exposed; positions 109 and 110 are buried; position 111 is intermediate; positions 112 and 113 are exposed; position 114 is intermediate; positions 115 and 116 are exposed; position 117 is intermediate; position 118 is exposed; position 119 is intermediate; position 120 is exposed; position 121 is intermediate; positions 122 and 123 are exposed; position 124 is intermediate; and positions 125, 126, 127, 128, and 129 are exposed. In some embodiments, a residue that is classified as “buried” comprises a substitution, relative to a CDR set forth in CDR of Table 1B or Table 2B, that is a conservative substitution that maintains charge and approximate size to maintain antibody conformation. In some embodiments, a residue classified as “exposed” is substituted, e.g., with a conservative substitution, or with a residue that provides improved binding to cancer cells compared to the parent sequence as shown in Table 1A or Table 2A.

[0174] In some embodiments, the HCDR3 of a tumor-binding antibody as described herein has at least 60% identity, at least 70% identity, at least 80% identity, at least 85%, at least 90% identity, or at least 95% identity to any one of the HCDR3 sequences shown in Table 1B or Table 2B. In some embodiments, at least two, three, or all four of the cysteine residues in a HCDR3 sequence as described herein are conserved in a variant. In further embodiments, the HCDR3 is at least 27, 28, 29, or 30 amino acids in length. In typical embodiments, the HCDR3 is 31 amino acids in length.

[0175] In some embodiments, the FR1 region of a V_{H} region of a tumor-binding antibody as described herein has at least 80% or at least 90% identity to the FR1 sequence from positions 1 to 25 of a V_{H} region of any one of SEQ ID NOS:77-122 or 1333-1526 or 1725. In some embodiments, the FR1 region has at least 95% identity to the FR1 sequence from position 1 to 25 of a V_{H} region of any one of SEQ ID NOS:77-122 or 1333-1526 or 1725. In some embodiments, the FR1 comprises the amino acid sequence from position 1 to 25 of a V_{H} region of any one of SEQ ID NOS:77-122 or 1333-1526 or 1725.

[0176] In some embodiments, the FR2 region of a V_{H} region of a tumor-binding antibody as described herein as at least 80% or at least 90% identity to the FR2 sequence from position 36 to 49 of a V_{H} region of any one of SEQ ID NOS:77-122 or 1333-1526 or 1725. In some embodiments, the FR2 region has at least 95% identity to the FR2 sequence from position 36 to 49 of a V_{H} region of any one of SEQ ID NOS:77-122 or 1333-1526 or 1725. In some embodiments, the FR2 comprises the amino acid sequence from position 36 to 49 of a V_{H} region of any one of SEQ ID NOS:77-122 or 1333-1526 or 1725.

[0177] In some embodiments, the FR3 region of a V_{H} region of a tumor-binding antibody of the invention has at least 80% or at least 90% identity to the FR3 sequence from position 69 to 98 of a V_{H} region of any one of SEQ ID NOS:77-122 or 1333-1526 or 1725. In some embodiments, the FR3 region has at least 95% identity to the FR3 sequence from position 69 to 98 of a V_{H} region of any one of SEQ ID NOS:77-122 or 1333-1526 or 1725. In some embodiments, the FR3 comprises the amino acid sequence from position 69 to 98 of a V_{H} region of any one of SEQ ID NOS:77-122 or 1333-1526 or 1725.

[0178] In some embodiments, the FR4 region a V_{H} region of comprises the amino acid sequence from position 130 to 140 of a V_{H} region of any one of SEQ ID NOS:77-122 or 1333-1526 or 1725. In some embodiments, the FR4 region comprises a substitution at one or two of the positions 130 to 140 relative to the corresponding sequence of a V_{H} region of any one of SEQ ID NOS:77-122 or 1333-1526 or 1725.

[0179] In some embodiments, a tumor-binding antibody of the invention comprises a heavy chain CDR1 sequence GFTFSKAWM(S/T) (SEQ ID NO: 1749). In some embodiments, the CDR1 comprises GFTFSKAWMS (SEQ ID NO:1). In alternative embodiments, the CDR1 comprises GFTFSKAWMT (SEQ ID NO:8). In some embodiments, 1, 2, or 3 amino acids are substituted relative to the sequence GFTFSKAWMS (SEQ ID NO:1) or GFTFSKAWMT (SEQ ID NO:8). For example, in some embodiments, the CDR1 comprises N at position 30, N at position 31; and/or Y at position 33. In some embodiments, the CDR1 has at least 60% identity, or at least 70% identity, at least 80% identity, or at least 90% identity to the sequence GFTFSKAWMS (SEQ ID NO:1) or GFTFSKAWMT (SEQ ID NO:8).

[0180] In some embodiments, a tumor binding antibody of the invention comprises a heavy chain HCDR2 sequence RIKS(V/T)(T/S)(D/E)G(E/G)(I/T)T(D/E)YAAPVKG (SEQ ID NO: 1770). In some embodiments, the HCDR2 comprises RIKS(V/T)(T/S)(D/E)G(E/G)(I/T)TDYAAPVKG (SEQ ID NO: 1750). In some embodiments, the HCDR2 comprises RIKSVTDGETTDYAAPVKG (SEQ ID NO:9). In some embodiments, the HCDR2 comprises RIKSVTEGETTDYAAPVKG (SEQ ID NO:17). In some embodiments, the HCDR2 comprises RIKSTSDGGITDYAAPVKG (SEQ ID NO:16). In some embodiments, 1, 2, 3, 4, 5, 6, 7, or 8 amino acids are substituted relative to the sequence RIKSVTDGETTDYAAPVKG (SEQ ID NO:9); or 1, 2, 3, 4, 5, 6, 7, or 8 amino acids are substituted relative to the sequence RIKSVTEGETTDYAAPVKG (SEQ ID NO:17). For example, in some embodiments, the HCDR2 comprises a substituted sequence having one or more of the following positions: position 51 is V; position 54 is K or T; position 55 is S; position 56 is S; position 58 is G; position 59 is I; position 60 is K; or position 61 is E. In some embodiments, 1, 2, 3, 4, 5, 6, 7, or 8 amino acids are substituted relative to the sequence RIKSVTEGETTDYAAPVKG (SEQ ID NO:17). For example, in some embodiments, the HCDR2 comprises a substituted sequence in which position 51 is V; position 54 is V, K or T; position 55 is T, position 58 is E; position 59 is T; position 60 is K; and/or position 61 is E. In some embodiments, if the HCDR2 comprises a sequence in which position 56 is S, the HCDR1 comprises a W at position 33. In some embodiments, the HCDR2 has at least 60% identity, or at least 70% identity, to the sequence RIKSVTDGETTDYAAPVKG (SEQ ID NO:9); or at least 60% identity, or at least 70% identity, to the sequence RIKSVTEGETTDYAAPVKG (SEQ ID NO:17). In some embodiments, the CDR2 sequence has at least 80% identity, or at least 90% identity, to the sequence RIKSVTDGETTDYAAPVKG (SEQ ID NO:9) or RIKSVTEGETTDYAAPVKG (SEQ ID NO:17).

[0181] In some embodiments, a tumor-binding antibody comprises a V_{H} CDR3 sequence T(S/T)SFCCRGG(R/S)CPS(H/R)DTS(Y/F)CGG(Q/S)(Y/D)(K/N/S)(S/R)YYYMDV (SEQ ID NO: 1747). In some embodiments, the HCDR3 comprises any one of the HCDR3 sequences shown in Table 1B or Table 2B. In some embodiments, the HCDR3 comprises a sequence as shown in Table 1B or Table 2B in which 1, 2, 3, 4, 5, 6, 7, 8, or 9 amino acids are substituted relative to the CDR3 sequence. For example, in some embodiments, the HCDR3 comprises V at position 99, T at position 100, R at position 108, D at position 111, R at position 112, Y at position 116, and/or S at position 120. In some embodiments, a V_{H} CDR3 comprises a sequence

(SEQ ID NO: 1751)
T(S/T)SFCCRGG(R/S)CPS(H/R)DTS(Y/F)CGG(Q/S)YKSYYYM
DV,
(SEQ ID NO: 1752)
T(S/T)SFCCRGG(R/S)CPS(H/R)DTS(Y/F)CGG(Q/S)DSRYYYM
DV,
(SEQ ID NO: 1753)
T(S/T)SFCCRGG(R/S)CPS(H/R)DTS(Y/F)CGG(Q/S)YNRYYYM
DV,
(SEQ ID NO: 1754)
T(S/T)SFCCRGG(R/S)CPS(H/R)DTS(Y/F)CGG(Q/S)YNSYYYM
DV,
or
(SEQ ID NO: 1755)
T(S/T)SFCCRGG(R/S)CPS(H/R)DTS(Y/F)CGG(Q/S)DKRYYYM
DV.

In some embodiments, a V_{H} CDR3 comprises a sequence

(SEQ ID NO: 1758)
T(S/T)SFCCRGGSCPSHDTS(Y/F)CGG(Q/S)YKSYYYMDV,
(SEQ ID NO: 1759)
T(S/T)SFCCRGGSCPSHDTS(Y/F)CGG(Q/S)DSRYYYMDV,
(SEQ ID NO: 1760)
T(S/T)SFCCRGGSCPSHDTS(Y/F)CGG(Q/S)YNRYYYMDV,
or
(SEQ ID NO: 1761)
T(S/T)SFCCRGGSCPSHDTS(Y/F)CGG(Q/S)DKRYYYMDV.

[0182] In some embodiments, a tumor-binding antibody of the invention comprises a heavy chain CDR1 sequence GFTFSKAWM(S/T) (SEQ ID NO: 1749). In some embodiments, the HCDR1 comprises GFTFSKAWMS (SEQ ID NO:1). In alternative embodiments, the HCDR1 comprises GFTFSKAWMT (SEQ ID NO:8). In some embodiments, 1, 2, or 3 amino acids are substituted relative to the sequence GFTFSKAWMS (SEQ ID NO:1) or GFTFSKAWMT (SEQ ID NO:8). For example, in some embodiments, the HCDR1 comprises N at position 30, N at position 31; and/or Y at position 33. In some embodiments, the HCDR1 has at least 60% identity, or at least 70% identity, at least 80% identity, or at least 90% identity to the sequence GFTFSKAWMS (SEQ ID NO:1) or GFTFSKAWMT (SEQ ID NO:8).

[0183] In some embodiments, a tumor-binding antibody of the invention comprises a heavy chain CDR2 sequence RIKS(V/T)(T/S)(D/E)G(E/G)(I/T)T(D/E)YAAPVKG (SEQ ID NO: 1770). In some embodiments, the HCDR2 comprises RIKS(V/T)(T/S)(D/E)G(E/G)(I/T)TDYAAPVKG (SEQ ID NO: 1750). In some embodiments, the HCDR2 comprises RIKSVTDGETTDYAAPVKG (SEQ ID NO:9). In some embodiments, the HCDR2 comprises RIKSVTEGETTDYAAPVKG (SEQ ID NO:17). In some embodiments, the CDR2 comprises RIKSTSDGGITDYAAPVKG (SEQ ID NO:16). In some embodiments, 1, 2, 3, 4, 5, 6, 7, or 8 amino acids are substituted relative to the sequence RIKSVTDGETTDYAAPVKG (SEQ ID NO:9); or 1, 2, 3, 4, 5, 6, 7, or 8 amino acids are substituted relative to the sequence RIKSVTEGETTDYAAPVKG (SEQ ID NO:17). For example, in some embodiments, the HCDR2 comprises a substituted sequence having one or more of the following positions: position 51 is V; position 54 is K or T; position 55 is S; position 56 is S; position 58 is G; position 59 is I; position 60 is K; or position 61 is E. In some embodiments, 1, 2, 3, 4, 5, 6, 7, or 8 amino acids are substituted relative to the sequence RIKSVTEGETTDYAAPVKG (SEQ ID NO:17). For example, in some embodiments, the HCDR2 comprises a substituted sequence in which position 51 is V; position 54 is V, K or T; position 55 is T, position 58 is E; position 59 is T; position 60 is K; and/or position 61 is E. In some embodiments, if the HCDR2 comprises a sequence in which position 56 is S, the HCDR1 comprises a W at position 33. In some embodiments, the HCDR2 has at least 60% identity, or at least 70% identity, to the sequence RIKSVTDGETTDYAAPVKG (SEQ ID NO:9); or at least 60% identity, or at least 70% identity, to the sequence RIKSVTEGETTDYAAPVKG (SEQ ID NO:17). In some embodiments, the CDR2 sequence has at least 80% identity, or at least 90% identity, to the sequence RIKSVTDGETTDYAAPVKG (SEQ ID NO:9) or RIKSVTEGETTDYAAPVKG (SEQ ID NO:17).

[0184] In some embodiments, an anti-tumor antibody comprises a V_{H} CDR3 sequence T(S/T)SFCCRGG(R/S)CPS(H/R)DTS(Y/F)CGG(Q/S)(Y/D)(K/N/S)(S/R)YYYMDV (SEQ ID NO: 1747). In some embodiments, the CDR3 comprises any one of the CDR3 sequences shown in Table 1 or Table 2. In some embodiments, the CDR3 comprises a CDR3 sequence as shown in Table 1 or Table 2 in which 1, 2, 3, 4, 5, 6, 7, 8, or 9 amino acids are substituted relative to the CDR3 sequence. For example, in some embodiments, the CDR3 comprises V at position 99, T at position 100, R at position 108, D at position 111, R at position 112, Y at position 116, and/or S at position 120. In some embodiments, a V_{H} CDR3 comprises a sequence

(SEQ ID NO: 1751)
T(S/T)SFCCRGG(R/S)CPS(H/R)DTS(Y/F)CGG(Q/S)YKSYYYM
DV,
(SEQ ID NO: 1752)
T(S/T)SFCCRGG(R/S)CPS(H/R)DTS(Y/F)CGG(Q/S)DSRYYYM
DV,
(SEQ ID NO: 1753)
T(S/T)SFCCRGG(R/S)CPS(H/R)DTS(Y/F)CGG(Q/S)YNRYYYM
DV,
(SEQ ID NO: 1754)
T(S/T)SFCCRGG(R/S)CPS(H/R)DTS(Y/F)CGG(Q/S)YNSYYYM
DV,
or
(SEQ ID NO: 1755)
T(S/T)SFCCRGG(R/S)CPS(H/R)DTS(Y/F)CGG(Q/S)DKRYYYM
DV.

In some embodiments, a V_{H} CDR3 comprises a sequence

(SEQ ID NO: 1758)
T(S/T)SFCCRGGSCPSHDTS(Y/F)CGG(Q/S)YKSYYYMDV,
(SEQ ID NO: 1759)
T(S/T)SFCCRGGSCPSHDTS(Y/F)CGG(Q/S)DSRYYYMDV,
(SEQ ID NO: 1760)
T(S/T)SFCCRGGSCPSHDTS(Y/F)CGG(Q/S)YNRYYYMDV,
or
(SEQ ID NO: 1761)
T(S/T)SFCCRGGSCPSHDTS(Y/F)CGG(Q/S)DKRYYYMDV.

### V_{L} Regions

[0185] In some embodiments, a tumor-binding antibody of the present invention that binds to an extracellular RNA-protein complex, e.g., that has activity in an FcγRIIa engagement assay, has one, two, or three CDRs of a V_{L} sequence as shown in Table 1A or Table 2A. In some embodiments, the tumor-binding antibody antibody has at least one mutation and no more than 10, 20, 30, 40 or 50 mutations in the V_{L} amino acid sequences compared to a V_{L} sequence of any one of SEQ ID NOS:123-168 or 1527-1720 or 1726. In some embodiments, the V_{L} amino acid sequence may comprise 1, 2, 3, 4, 5, 6, 7, 8, 9, or 10 amino acid insertions or deletions compared to a V_{L} sequence of any one of SEQ ID NOS:123-168 or 1527-1720 or 1726. In some embodiments, the V_{L} amino acid sequence may comprise a deletion or insertion, e.g., a 1, 2, 3, 4, 5, 6, or 7 amino acid deletion or insertion, relative to a CDR sequence shown in Table 1. In some embodiments, the V_{L} amino acid sequence may comprise a 1-amino acid or 2-amino acid deletion or insertion relative to a CDR sequence shown in Table 1B or Table 2B. In some embodiments, the V_{L} region comprises a CDR1 having 1 or 2 substitutions in relative to a CDR1 sequence of any one of SEQ ID NOS:48-58 or 751-944 or 1741. In some embodiments, a CDR1 has 3, 4, or 5 substitutions relative to a CDR1 sequence of any one of SEQ ID NOS:48-58 or 751-944 or 1741. In some embodiments, the V_{L} region comprises a CDR2 that has 1 or 2; or 1, 2, or 3; substitutions relative to the CDR2 sequence of any one of SEQ ID NOS:59-67 or 945-1138. In some embodiments, the V_{L} region comprises a CDR3 that has 1, 2, or 3; or 1, 2, 3, or 4; substitutions relative to a CDR3 sequence of any one of SEQ ID NOS:68-76 or 1139-1332. In some embodiments, an anti-tumor antibody of the present invention comprises a CDR1, CDR2, and CDR3, each having at least 70% identity to a CDR1, CDR2, and CDR3 as shown in Table 1 or Table 2. In some embodiments, an anti-tumor antibody of the present invention comprises a CDR1, CDR2, and CDR3, each having at least 80% identity to a CDR1, CDR2, and CDR3 as shown in Table 1B or Table 2B. In some embodiments, an anti-tumor antibody of the present invention comprises a CDR1, CDR2, and CDR3 as shown in Table 1B or Table 2B.

[0186] In some embodiments, a tumor-binding antibody of the present invention comprises a CDR1, CDR2, and CDR3 of an antibody designated as AIP-158623, AIP-155066, AIP-136538, AIP-166120, AIP-133645, AIP-187893, AIP-142079, AIP-160470, AIP-104188, AIP-157397, AIP-165430, AIP-189526, AIP-192482, AIP-122563, or AIP-171142 in Table 1A.

[0187] In some embodiments, a V_{L} region of a tumor-binding antibody of the present invention has a solvent exposure of each CDR side chain, in terms of square Angstroms, as specified in this paragraph, which is based on a Fab crystal structure of an illustrative antibody. Classification as buried, intermediate, or exposed is based on cutoff values as follows: less than about 10 Ang², about 10-50 Ang², or greater than about 50 Ang², respectively. The positions are determined with reference to any one of the V_{L} region sequences provided in Table 1A. Thus, in some embodiments, an anti-tumor antibody V_{L} of the invention comprises a CDR1 in which position 23 is exposed; position 24 is intermediate; positions 25 and 26 are exposed; positions 27 and 28 are intermediate; positions 29, 30, and 31 are exposed; positions 32, 33, and 34 are intermediate; and position 35 is exposed. In some embodiments, an anti-tumor antibody V_{L} of the invention comprises a CDR2 in which positions 51, 52, 53, 54, 55, 56, and 57 are exposed. In some embodiments, an anti-tumor antibody V_{L} of the invention comprises a CDR3 in which position 90 is exposed; position 91 is buried, position 92 is exposed; position 93 is buried, positions 94, 95, 96, and 97 are exposed; position 99 is intermediate; and position 100 is exposed. In some embodiments, a residue that is classified as “buried” comprises a substitution, relative to a CDR of Table 1B or Table 2B, that is a conservative substitution that maintains charge and approximate size to maintain antibody conformation. In some embodiments a residue classified as “exposed” is substituted, e.g., with a conservative substitution, or with a residue that provides improved binding to cancer cells compared to a sequence as shown in Table 1A or Table 2.

[0188] In some embodiments, a tumor-binding antibody of the invention comprises a light chain CDR1 sequence SGSSSNIGSSSVS (SEQ ID NO:48). In some embodiments, 1, 2, 3, 4, or 5 amino acids are substituted relative to the sequence SGSSSNIGSSSVS (SEQ ID NO:48). For example, in some embodiments, position 28 is Y or H. In some embodiments, position 30 is E. In some embodiments, position 32 is N. In some embodiments, position 33 is Y or F. In some embodiments, position 35 is D or E. In some embodiments, the CDR1 has at least 60% identity, at least 70% identity, at least 80% identity, or at least 90% identity to the sequence SGSSSNIGSSSVS (SEQ ID NO:48).

[0189] In some embodiments, a tumor-binding antibody of the invention comprises a light chain CDR2 sequence (K/R)(N/D)(N/D)QRPS (SEQ ID NO: 1771). In some embodiments, the CDR2 comprises a CDR2 sequence as shown in Table 1 or Table 2. In some embodiments, the CDR2 comprises a CDR2 sequence KNNQRPS (SEQ ID NO:59). In some embodiments, 1, 2, or 3 amino acid are substituted relative to the sequence KNNQRPS (SEQ ID NO:59). For example, in some embodiments, position 51 is R, position 52 is D, and/or position 53 is D. in some embodiments, the CDR2 sequence has at least 60% or at least 70% identity to the sequence KNNQRPS (SEQ ID NO:59).

[0190] In some embodiments, a tumor-binding antibody of the invention comprises a V_{L} CDR3 sequence STWD(D/E)SLSV(R/W)V (SEQ ID NO: 1772). In some embodiments, the CDR3 sequence comprises STWD(D/E)SLSVRV (SEQ ID NO: 1762). In some embodiments, the CDR3 comprises a CDR3 sequence as shown in Table 1 or Table 2. In some embodiments, the CDR3 sequence comprises STWDDSLSVRV (SEQ ID NO:68) or STWDESLSVRV (SEQ ID NO:73). In some embodiments, 1, 2, or 3 amino acids are substituted relative to the sequence STWDDSLSVRV (SEQ ID NO:68) or STWDESLSVRV (SEQ ID NO:73). For example, in some embodiments position 90 is A, position 91 is I, and/or position 97 is G.

[0191] In some embodiments, the FR1 region of a V_{L} region of a tumor-binding antibody of the invention has at least 80% or at least 90% identity to the FR1 sequence from position 1 to 22 off a V_{L} region sequence of Table 1. In some embodiments, the FR1 region has at least 95% identity to the FR1 sequence from position 1 to 22 of a V_{L} region sequence of Table 1. In some embodiments, the FR1 comprises the amino acid sequence from positions 1 to 22 of a V_{L} region sequence of Table 1.

[0192] In some embodiments, the FR2 region of a V_{L} region of a tumor-binding antibody of the invention has at least 80% or at least 90% identity to the FR2 sequence from position 36 to 50 off a V_{L} region sequence of Table 1. In some embodiments, the FR2 region has at least 95% identity to the FR2 sequence from position 36 to 50 of a V_{L} region sequence of Table 1. In some embodiments, the FR2 comprises the amino acid sequence from positions 36 to 50 of a V_{L} region sequence of Table 1.

[0193] In some embodiments, the FR3 region of a V_{L} region of a tumor-binding antibody of the invention has at least 80% or at least 90% identity to the FR3 sequence from position 58 to 89 f a V_{L} region sequence of Table 1. In some embodiments, the FR3 region has at least 90% identity, or at least 95% identity to the FR3 sequence from position 58 to 89 off a V_{L} region sequence of Table 1 In some embodiments, the FR3 comprises the amino acid sequence from position 58 to 89 of a V_{L} region sequence of Table 1.

[0194] In some embodiments, the FR4 region a V_{H} region of comprises the amino acid sequence from position 101 to 110 of a V_{L} region sequence of Table 1. In some embodiments, the FR4 region comprises a substitution at one or two of the positions 101 to 110 relative to the corresponding sequence of a V_{L} region sequence of Table 1.

[0195] In some embodiments, a tumor-binding antibody of the present invention comprises a V_{L} region CDR1, CDR2, and/or a CDR3 as described in the preceding paragraphs is this section. In some embodiments one or two of the V_{L} CDR sequences comprise a CDR sequence as shown in Table 1. In some embodiments, an anti-tumor antibody of the present invention comprises a V_{L} region CDR1, CDR2 and/or a CDR3 as described in the preceding paragraphs in this section and has at least 70% identity, at least 75% identity, at least 80% identity, or at least 85% identity, at least 90% identity, or at least 95% identity to any one of the V_{L} sequences as shown in Table 1. In some embodiments, the anti-tumor antibody comprises a CDR1, CDR2, and CDR3 as shown in Table 1 and has at least 70% identity, at least 75% identity, at least 80% identity, or at least 85% identity, at least 90% identity, or at least 95% identity to any one of the V_{L} sequences as shown in Table 1.

[0196] In some embodiments, a tumor-binding antibody comprises an LCDR1, LCDR2, and LCDR3 of an antibody designated as AIP-158623, AIP-155066, AIP-136538, AIP-166120, AIP-133645, AIP-187893, AIP-142079, AIP-160470, AIP-104188, AIP-157397, AIP-165430, AIP-189526, AIP-192482, AIP-122563, or AIP-171142 and comprises at least 80%, or at least 90%, identity to the corresponding V_{L} sequence shown in Table 1, or comprises the V_{L} sequence of the corresponding V_{L} sequence in Table 1.

### Illustrative Antibodies

[0197] In some embodiments, the provided herein is an antibody that binds to a tumor through a binding interaction with an extracellular RNA-protein complex, wherein the antibody comprises heavy and light chain CDRs shown in Table 1 or Table 2. In some embodiments, the antibody comprises an HCDR1 of any one of SEQ ID NOS:1-8 or 169-362, or a variant thereof in which 1, 2, 3, 4, or 5 amino acids are substituted relative to the sequence, an HCDR2 of any one of SEQ ID NOS:9-19 or 363-556, or a variant thereof in which 1, 2, 3, 4, or 5 amino acids are substituted relative to the sequence; an HCDR3 of any one of SEQ ID NOS:20-47 or 557-750 or 1727 or a variant thereof in which 1, 2, 3, 4, 5, 6, 7, 8, 9, or 10 amino acids are substituted relative to the sequence; an LCDR1 of any one of SEQ ID NOS:48-58 or 751-944 or 1741, or a variant thereof in which 1, 2, 3, 4, or 5 amino acids are substituted relative to the sequence; an LCDR2 of any one of SEQ ID NOS:59-67 or 945-1138, or a variant thereof in which 1, 2, or 3 amino acids are substituted relative to the sequence; and an LCDR3 of any one of SEQ ID NOS:68-76 or 1139-1332, or a variant thereof in which 1, 2, 3, 4, or 5 amino acids are substituted relative to the sequence. In some embodiments, at least 1 or 2 of the substitutions are conservative substitutions. In some embodiments, at least 50% or at least 60%, at least 70%, at least 80%, or at least 90% of of the substitutions, relative to the referenced CDR sequence in Table 1 or Table 2, are conservative substitutions.

[0198] In some embodiments, the antibody comprises an HCDR1 of any one of SEQ ID NOS:1-8 or 169-362, or a variant thereof in which 1 or 2 amino acids are substituted relative to the sequence, an HCDR2 of any one of SEQ ID NOS:9-19 or 363-556, or a variant thereof in which 1 or 2 amino acids are substituted relative to the sequence; an HCDR3 of any one of SEQ ID NOS:20-47 or 557-750 or 1727 or a variant thereof in which 1, 2, or 3; or in which 1 or 2; amino acids are substituted relative to the sequence; an LCDR1 of any one of SEQ ID NOS:48-58 or 751-944 or 1741, or a variant thereof in which 1 or 2 amino acids are substituted relative to the sequence; an LCDR2 of any one of SEQ ID NOS:59-67 or 945-1138, or a variant thereof in which 1 or 2 amino acids are substituted relative to the sequence; and an LCDR3 of any one of SEQ ID NOS:68-76 or 1139-1332, or a variant thereof in which 1 or 2 amino acids are substituted relative to the sequence. In some embodiments, at least 1 or 2 of the substitutions are conservative substitutions.

[0199] In some embodiments, the provided herein is an antibody that binds to a tumor through a binding interaction with an extracellular RNA-protein complex, wherein antibody comprises six CDRs of an antibody designated in Table 1A or Table 2A; or a variant of the antibody in which at least one CDR, at least two CDRs, at least three CDRs, at least four CDRs, at least five CDRs, or all six CDRs have 1 to 2 amino acid substitutions compared to the corresponding CDR of the antibody shown in Table 1A or 2A.

[0200] In some embodiments, provided herein is a tumor-binding antibody that binds to an extracellular RNA-protein complex, wherein the antibody comprises CDRs according to the following formula. For each CDR, an “X” residue is numbered by its position in the CDR, e.g., X₃ is in the third position of CDR.

(a) an HCDR1 sequence G(F/Y)X₃X₄(A/S)X₆A(W/Y)X₉(S/T), wherein X₃ is D, T or V; X₄ is A, F, or Y; X₆ is A, H, K, M, N or R; and X₉ is F, M, or Y;
(b) an HCDR2 sequence (F/R)I(K/Q)(A/S)X₅X₆X₇(A/G)X₉X₁₀T(D/E)(A/S)(P/S)(K/Q), wherein X5 is A, N, T, or V; X6 is D, H, Q, S or T; X7 is D, E, or N; X9 is E, G, H, K or Q; and X10 is A, I, Q or T;
(c) an HCDR3 sequence (I/T)(S/T)X₃(F/Y)X₅CX₇(G/S)X₉X₁₀CX₁₂X₁₃X₁₄(D/E)X₁₆SX₁₈X₁₉X₂₀X₂₁X₂₂X₂₃X₂₄X₂₅(F/Y) (F/Y)X₂₈X₂₉(D/N)X₃₁, wherein X₃ is A, P, S, or T; X₅ is A, C, or S; X₇ is H, L, Q, or R; X₉ is A, G, K, or N; X₁₀ is A, N, Q, R, or S; X₁₂ is A, L, or P; X₁₃ is A, N, or S; X₁₄ is H, Q, R, or S; X₁₆ is N, Q, or T; X₁₈ is F, M, or Y; X₁₉ is C, S, or V; X₂₀ is A, G, or N; X₂₁ is A, G, or N; X₂₂ is Q, S, or Y; X₂₃ is D, F, N, S, or Y; X₂₄ is A, K, N, P, Q, or S; X₂₅ is D, K, Q, R, or S; X₂₈ is F, L, W, or Y; X₂₉ is F, M, or V; and X₃₁ is I, P, or V;
(d) an LCDR1 sequence X₁G(A/S)X₄(S/T)(D/N)I(G/Q)(H/S)X₁₀X₁₁(T/V)X₁₃, wherein X₁ is H, S, or T; X₄ is E, K, P, or S; X₁₀ is A, H, N, S, or T; X₁₁ is A, D, S, T, or Y; and X₁₃ is A, L, S, T or Y;
(e) an LCDR2 sequence X₁(D/N)X₃X₄(Q/R)(A/P)X₇, wherein X₁ is A, H, K, M, N, or R; X₃ is N, S, or T; X₄ is A, L, Q, or Y; and X₇ is L, Q, S, or Y; and
(f) an LCDR3 sequence (A/S)(S/T)(F/W)(D/N)X₅X₆X₇X₈(I/V)X₁₀(I/V), wherein X₅ is D, E, or N; X₆ is A, D, Q, or S; X₇ is L, N, or S; X₈ is L, N, S, or T; and X₁₀ is H, K, Q, R, or W. In some embodiments, each heavy or light chain CDR of the antibody differs from a corresponding heavy or light chain CDR in Table 1A or Table 2A by no more than two amino acids, or by no more than one amino acid.

[0201] In some embodiments, provided herein is an antibody that binds to a tumor through a binding interaction with an extracellular RNA-protein complex, wherein the antibody comprises six CDRs of an antibody shown in Table 1A or Table 2A, or a variant thereof in which at least one, two, three, four, five, or all six CDRs comprise 1 or 2 amino acid substitutions relative to the corresponding CDR sequence in Table 1B or Table 2B. In some embodiments, provided herein is an antibody that binds to a tumor through a binding interaction with an extracellular RNA-protein complex, wherein the antibody comprises six CDRs of an antibody shown as shown in Table 1A or Table 2A, or a variant thereof in which at least one, two, three, four, five, or all six CDRs comprise 1 or 2 amino acid substitutions relative to the corresponding CDR sequence in Table 1B or Table 2B. In some embodiments, the antibody comprises six CDRs of an antibody designated as AIP-192482, AIP-171142, AIP-165430, AIP-189526, AIP-122563, AIP-158623, AIP-155066, AIP-166120, AIP-133645, AIP-187893, AIP-142079, AIP-160470, AIP-102396, AIP-150055, AIP-167084, AIP-185304, AIP-134770, AIP-141887, AIP-196203, AIP-128195, AIP-116579, AIP-192329, AIP-197809, AIP-142489, AIP-167726, AIP-199834, AIP-143179, AIP-195587, AIP-153462, AIP-115363, AIP-151090, AIP-168083, AIP-161082, AIP-114196, AIP-189338, AIP-183190, AIP-110143, AIP-147176, AIP-134312, AIP-128243, AIP-156172, AIP-147389, AIP-124314, AIP-185291, AIP-135247, AIP-113513, AIP-102299, AIP-179097, AIP-109343, AIP-119622, AIP-191735, AIP-157078, AIP-153475, AIP-133650, AIP-190915, AIP-167400, AIP-109729, AIP-151709, AIP-136628, AIP-101601, AIP-146871, AIP-170053, AIP-199483, AIP-162041, AIP-180675, AIP-183133, AIP-191470, AIP-151167, AIP-106633, AIP-102624, AIP-109484, AIP-126080, AIP-161571, AIP-163039, AIP-101235, AIP-182061, AIP-181246, AIP-192216, AIP-171912, AIP-172872, AIP-167833, AIP-190051, AIP-145518, AIP-167533, AIP-112580, AIP-143155, AIP-119664, AIP-190526, AIP-114403, AIP-156760, AIP-103803, AIP-195588, AIP-145722, AIP-178251, AIP-116142, AIP-183350, AIP-127108, AIP-128147, AIP-109510, AIP-104086, AIP-143132, AIP-170105, AIP-169636, AIP-152243, AIP-138776, AIP-103817, AIP-130491, AIP-188155, AIP-167246, AIP-106139, AIP-198351, AIP-159326, AIP-192275, AIP-190761, AIP-166832, AIP-148062, AIP-129145, AIP-111240, AIP-153888, AIP-130915, AIP-109048, AIP-170569, AIP-154873, AIP-159037, AIP-186826, AIP-156514, AIP-157122, AIP-173276, AIP-150485, AIP-166847, AIP-124013, AIP-126285, AIP-168605, AIP-190274, AIP-136060, AIP-180422, AIP-166722, AIP-127782, AIP-189473, AIP-192571, AIP-112328, AIP-125258, AIP-150199, AIP-125062, AIP-177193, AIP-115388, AIP-107759, AIP-170221, AIP-143369, AIP-189475, AIP-102833, AIP-157045, AIP-175775, AIP-154181, AIP-125984, AIP-160829, AIP-184744, AIP-128136, AIP-181273, AIP-153125, or AIP-131972, or a variant thereof in which at least one, two, three, four, five, or all six CDRs comprise 1 or 2 amino acid substitutions relative to the corresponding CDR sequence in Table 2B.

[0202] In some embodiments, provided herein is a tumor-binding antibody that binds to an extracellular RNA-protein complex, wherein the antibody comprises CDRs according to the following formula. For each CDR, an “X” residue is numbered by its position in the CDR, e.g., X3 is in the third position of CDR.
[0203] (a) an HCDR1 sequence G(F/Y)X₃X₄(A/S)X₆A(W/Y)(F/M)(S/T), wherein X₃ is D, T or V; X₄ is A, F, or Y; and X₆ is A, H, K, M, or N;
[0204] (b) an HCDR2 sequence RIK(A/S)X₅X₆(D/N)(A/G)X₉X₁₀(D/E)(A/S)(P/S)(K/Q), wherein X₅ is A, N, T, or V; X₆ is D, H, Q, S or T; X₉ is E, G, H, K or Q; and X₁₀ is A, I, Q, or T;
[0205] (c) an HCDR3 sequence (I/T)(S/T)X₃(F/Y)CCX₇(G/S)X₉X₁₀CX₁₂(N/S)X₁₄(D/E)TS(F/Y)CX₂₀(G/N)X₂₂X₂₃X₂₄, X₂₅(F/Y)Y X₂₈X₂₉(D/N)X₃₁ (SEQ ID NO: 1744), wherein X₃ is A, P, or S; X₇ is H, L, Q, or R; X₉ is A, G, K, or N; X₁₀ is A, N, Q, R, or S; X₁₂ is A, L, or P; X₁₄ is H, Q, R, or S; X₂₀ is A, G, or N; X₂₂ is Q, S, or Y; X₂₃ is D, F, N, or Y; X₂₄ is A, K, N, P, or Q; X₂₅ is D, Q, R, or S; X₂₈ is F, L, W, or Y; X₂₉ is F, M, or V; and X₃₁ is I, P, or V;
[0206] (d) an LCDR1 sequence (S/T)G(A/S)X₄(S/T)(D/N)IG(H/S)X₁₀X₁₁(T/V)X₁₃, wherein X₄ is K, P, or S, X₁₀ is A, N, S, or T; X₁₁ is A, S, T, or Y; and X₁₃ is A, S, T or Y;
[0207] (e) an LCDR2 sequence X₁(D/N)X₃X₄(Q/R)(A/P)X₇, wherein X₁ is A, H, K, M, N, or R; X₃ is N, S, or T; X₄ is A, L, Q, or Y, and X₇ is L, Q, S, or Y; and
[0208] (f) an LCDR3 sequence (A/S)(S/T)W(D/N)X₅X₆X₇X₈(I/V)X₁₀(I/V), wherein X₅ is D, E, or N, X₆ is A, D, Q, or S, X₇ is L, N, or S; X₈ is L, N, S, or T; and X₁₀ is H, K, Q, or R.

[0209] In some embodiments, provided herein are tumor-binding antibodies comprising a V_{H} having at least 70% identity, at least 75% identity, at least 80% identity, or at least 85% identity, at least 90% identity, or at least 95% identity to the amino acid sequence of a V_{H} region of any one of SEQ ID NOS:77-122 or 1333-1526 or 1725. In some embodiments, provided herein are anti-tumor antibodies comprising a V_{L} having at least 70% identity, at least 75% identity, at least 80% identity, or at least 85% identity, at least 90% identity, or at least 95% identity to the amino acid sequence of a V_{L} region of any one of SEQ ID NOS:123-168 or 1527-1720 or 1726.

[0210] In some embodiments, a tumor-binding antibody comprises a V_{H} comprising an amino acid sequence of one of SEQ ID NOS:77-122 or 1333-1526; or a V_{L} comprising an amino acid sequence of any one of SEQ ID NOS:123-168 or 1527-1720.

[0211] In some embodiments, a tumor-binding antibody of the present invention comprises the V_{H} and the V_{L} of any one of the antibodies designated by AIP number (an “AIP antibody”) in Table 1A or Table 2A. In some embodiments, the tumor-binding antibody is a variant of the antibody in which the V_{H} has at least 85% identity, or at least 90% identity; or at least 95% identity; and a V_{L} having at least 85% identity, or at least 90% identity; or at least 95% identity to the V_{H} sequence of the AIP antibody as shown in Table 1A or Table 2A and the V_{L} has at least 85% identity, or at least 90% identity; or at least 95% identity to the V_{L} sequence of the AIP antibody as shown in Table 1A or Table 2A. In some embodiments, the variant antibody has no more than ten mutations, or no more than nine mutations, no more than eight mutations, or no more than seven mutations in total in the heavy and light chain CDR sequences compared to the CDR sequence of the AIP antibody. In some embodiments, the antibody has six, five, four, three, two or one mutation in total in the heavy and light chain CDR sequences compared to the CDR sequences of the AIP antibody. In some embodiments, all of the mutations are substitutions relative to sequence of the AIP antibody as shown in Table 1.

[0212] In some embodiments, a tumor-binding antibody of the invention has the CDRs of an antibody designated as AIP-158623, AIP-155066, AIP-136538, AIP-166120, AIP-133645, AIP-187893, AIP-142079, AIP-160470, AIP-104188, AIP-157397, AIP-165430, AIP-189526, AIP-192482, AIP-122563, or AIP-171142. In some embodiments, the antibody additionally has at least 80%, or at least 90%, identity to the corresponding V_{H} and V_{L} sequences shown in Table 1.

Antibodies that Exhibit Anti-Tumor Activity

[0213] In one aspect, provided herein are antibodies that exhibit inhibitory effects on tumors, including decreasing rate of tumor growth, size, tumor invasion and/or metastasis. Such antibodies exhibit anti-tumor effects in vivo, e.g., when administered to subjects that has a tumor having an extracellular RNA-protein complex. In some embodiments, a V_{H} region or a V_{L} region of such an antibody has at least two, three, four, five, or six, or more modifications, e.g., substitutions, relative to the illustrative antibody sequences as described herein. In some embodiments, an anti-tumor antibody comprises an antibody as shown in Table 1A (AIP designation AIP-101235, AIP-127782, AIP-189473, AIP-192571, AIP-125258, AIP-150199, AIP-115388, AIP-143369, AIP-157045, AIP-175775, AIP-154181, AIP-125984, AIP-160829, AIP-184744, AIP-128136, AIP-181273, AIP-153125, AIP-160470, AIP-192482, AIP-171142, AIP-157397, AIP-165430, AIP-189526, AIP-122563, AIP-158623, AIP-155066, AIP-136538, AIP-166120, AIP-133645, AIP-187893, AIP-142079, AIP-104188, AIP-106042, AIP-100196, AIP-180675, AIP-170105, AIP-126080, AIP-161571, AIP-181246, AIP-192216, AIP-168605, AIP-172872, AIP-190051, AIP-167533, AIP-112580, AIP-136060), or a variant thereof as described herein. In some embodiments, an anti-tumor antibody comprises the six CDRs of an antibody as shown in Table 1B (AIP designation AIP-101235, AIP-127782, AIP-189473, AIP-192571, AIP-125258, AIP-150199, AIP-115388, AIP-143369, AIP-157045, AIP-175775, AIP-154181, AIP-125984, AIP-160829, AIP-184744, AIP-128136, AIP-181273, AIP-153125, AIP-160470, AIP-192482, AIP-171142, AIP-157397, AIP-165430, AIP-189526, AIP-122563, AIP-158623, AIP-155066, AIP-136538, AIP-166120, AIP-133645, AIP-187893, AIP-142079, AIP-104188, AIP-106042, AIP-100196, AIP-180675, AIP-170105, AIP-126080, AIP-161571, AIP-181246, AIP-192216, AIP-168605, AIP-172872, AIP-190051, AIP-167533, AIP-112580, AIP-136060), or a variant thereof as described herein.

### V_{H} Regions

[0214] In some embodiments, an anti-tumor antibody of the present invention has one, two, or three CDRs of a V_{H} sequence of as shown in Table 1. In some embodiments, the anti-tumor antibody has at least one mutation and no more than 10, 20, 30, 40 or 50 mutations in the V_{H} amino acid sequence compared to a V_{H} sequence of any one of SEQ ID NOS:77-122. In some embodiments, the V_{H} amino acid sequence may comprise 1, 2, 3, 4, 5, 6, 7, 8, 9, or 10 amino acid insertions or deletions compared to a V_{H} sequence of any one of SEQ ID NOS:77-122. In some embodiments, the V_{H} amino acid sequence may comprise a deletion or insertion, e.g., a 1, 2, 3, 4, or 5 amino acid deletions or insertions, relative to a CDR sequence of a V_{H} region of any one of SEQ ID NOS:77-122. In some embodiments, the V_{H} amino acid sequence may comprise a 1-amino acid or 2-amino acid deletion or insertion relative to a CDR sequence of a V_{H} region of any one of SEQ ID NOS:77-122. In some embodiments, the V_{H} region comprises an HCDR1 having 1 or 2 substitutions in relative to an HCDR1 sequence of any one of SEQ ID NOS:1-8. In some embodiments, an HCDR1 has 3 or 4 substitutions relative to an HCDR1 sequence of any one of SEQ ID NOS:1-8. In some embodiments, the V_{H} region comprises an HCDR2 that has 1, 2, 3, or 4 substitutions relative to an HCDR2 sequence of any one of SEQ ID NOS:9-19. In some embodiments, the V_{H} region has 5, 6, 7, or 8 substitutions relative to an HCDR2 sequence of any one of SEQ ID NOS:9-19. In some embodiments, the V_{H} region comprises an HCDR3 that has 1, 2, 3, or 4 substitutions relative to an HCDR3 sequence of any one of SEQ ID NOS:20-47. In some embodiments, the V_{H} region has 5, 6, 7, or 8 substitutions relative to an HCDR3 sequence of any one of SEQ ID NOS:20-47. In some embodiments, the V_{H} region has 9, 10, 11, 12, 13, or 14 substitutions relative to an HCDR3 sequence of any one of SEQ ID NOS:20-47. In some embodiments, an anti-tumor antibody of the present invention comprises a V_{H} region CDR1, CDR2, and CDR3, each having at least 80% identity to the corresponding CDR1, CDR2, and CDR3 of a V_{H} region of any one of SEQ ID NOS:77-122. In some embodiments, an anti-tumor antibody of the present invention comprises a CDR1, CDR2, and CDR3, each having at least 90% identity to the corresponding CDR1, CDR2, and CDR3 of a V_{H} region of any one of SEQ ID NOS:77-122. In some embodiments, an anti-tumor antibody of the present invention comprises a CDR1, CDR2, and CDR3 of a V_{H} region of any one of SEQ ID NOS:77-122. In some embodiments, a tumor-binding antibody of the present invention comprises a CDR1, CDR2, and CDR3 of an antibody designated as AIP-158623, AIP-155066, AIP-136538, AIP-166120, AIP-133645, AIP-187893, AIP-142079, AIP-160470, AIP-104188, AIP-157397, AIP-165430, AIP-189526, AIP-192482, AIP-122563, or AIP-171142 in Table 1A.

[0215] In some embodiments, a V_{H} region of anti-tumor antibody of the present invention has a solvent exposure of each CDR side chain, in terms of square Angstroms, as specified in this paragraph, based on a Fab crystal structure of an illustrative antibody. Classification as buried, intermediate, or exposed is based on cutoff values as follows: less than about 10 Ang², about 10-50 Ang², or greater than about 50 Ang², respectively. The positions are determined with reference to any one of the V_{H} region sequences of SEQ ID NOS:77-122 of Table 1A. Thus, in some embodiments, an anti-tumor antibody of the invention comprises a CDR1 in which positions 26, 27, 28, 29, 30, and 31 are exposed; position 32 is buried; position 33 is exposed; and positions 34 and 35 are intermediate. In some embodiments, an anti-tumor antibody of the invention comprises a CDR2 in which position 50 is intermediate; position 51 is exposed; position 53 is buried; positions 54, 55, 56, 57, 58, 59, and 60 are exposed; position 61 is intermediate; and positions 62, 63, 64, 65, 66, 67, and 68 are exposed. In some embodiments, an anti-tumor antibody of the invention comprises a CDR3 in which position 99 is exposed; position 100 is buried; position 101 is intermediate; positions 102, 103, and 104 are buried; positions 105, 106, 107, and 108 are exposed; positions 109 and 110 are buried; position 111 is intermediate; positions 112 and 113 are exposed; position 114 is intermediate; positions 115 and 116 are exposed; position 117 is intermediate; position 118 is exposed; position 119 is intermediate; position 120 is exposed; position 121 is intermediate; positions 122 and 123 are exposed; position 124 is intermediate; and positions 125, 126, 127, 128, and 129 are exposed. In some embodiments, a residue that is classified as “buried” comprises a substitution, relative to a CDR of a V_{H} region of any one of SEQ ID NOS:77-122, that is a conservative substitution that maintains charge and approximate size to maintain antibody conformation. In some embodiments a residue classified as “exposed” is substituted, e.g., with a conservative substitution, or with a residue that provides improved binding to cancer cells compared to a parent antibody of Table 1A.

[0216] In some embodiments, the HCDR3 of an anti-tumor antibody as described herein has at least 60% identity, at least 70% identity, at least 80% identity, at least 85%, at least 90% identity, or at least 95% identity to any one of the HCDR3 sequences SEQ ID NOS:20-47. In some embodiments, at least two, three, or all four of the cysteine residues in a HCDR3 sequence as described herein are conserved in a variant. In further embodiments, the HCDR3 is at least 27, 28, 29, or 30 amino acids in length. In typical embodiments, the HCDR3 is 31 amino acids in length.

[0217] In some embodiments, the FR1 region of a V_{H} region of an anti-tumor antibody as described herein has at least 80% or at least 90% identity to the FR1 sequence from positions 1 to 25 of a V_{H} region of any one of SEQ ID NOS:77-122. In some embodiments, the FR1 region has at least 95% identity to the FR1 sequence from position 1 to 25 of a V_{H} region of any one of SEQ ID NOS:77-122. In some embodiments, the FR1 comprises the amino acid sequence from position 1 to 25 of a V_{H} region of any one of SEQ ID NOS:77-122.

[0218] In some embodiments, the FR2 region of a V_{H} region of an anti-tumor antibody as described herein as at least 80% or at least 90% identity to the FR2 sequence from position 36 to 49 of a V_{H} region of any one of SEQ ID NOS:77-122. In some embodiments, the FR2 region has at least 95% identity to the FR2 sequence from position 36 to 49 of a V_{H} region of any one of SEQ ID NOS:77-122. In some embodiments, the FR2 comprises the amino acid sequence from position 36 to 49 of a V_{H} region of any one of SEQ ID NOS:77-122.

[0219] In some embodiments, the FR3 region of a V_{H} region of an anti-tumor antibody of the invention has at least 80% or at least 90% identity to the FR3 sequence from position 69 to 98 of a V_{H} region of any one of SEQ ID NOS:77-122. In some embodiments, the FR3 region has at least 95% identity to the FR3 sequence from position 69 to 98 of a V_{H} region of any one of SEQ ID NOS:77-122. In some embodiments, the FR3 comprises the amino acid sequence from position 69 to 98 of a V_{H} region of any one of SEQ ID NOS:77-122.

[0220] In some embodiments, the FR4 region a V_{H} region of comprises the amino acid sequence from position 130 to 140 of a V_{H} region of any one of SEQ ID NOS:77-122. In some embodiments, the FR4 region comprises a substitution at one or two of the positions 130 to 140 relative to the corresponding sequence of a V_{H} region of any one of SEQ ID NOS:77-122.

[0221] In some embodiments, an anti-tumor antibody of the invention comprises a heavy chain CDR1 sequence GFTFSKAWM(S/T) (SEQ ID NO: 1749). In some embodiments, the CDR1 comprises GFTFSKAWMS (SEQ ID NO:1). In alternative embodiments, the CDR1 comprises GFTFSKAWMT (SEQ ID NO:8). In some embodiments, 1, 2, or 3 amino acids are substituted relative to the sequence GFTFSKAWMS (SEQ ID NO:1) or GFTFSKAWMT (SEQ ID NO:8). For example, in some embodiments, the CDR1 comprises N at position 30, N at position 31; and/or Y at position 33. In some embodiments, the CDR1 has at least 60% identity, or at least 70% identity, at least 80% identity, or at least 90% identity to the sequence GFTFSKAWMS (SEQ ID NO:1) or GFTFSKAWMT (SEQ ID NO:8).

[0222] In some embodiments, an anti-tumor antibody of the invention comprises a heavy chain CDR2 sequence RIKS(V/T)(T/S)(D/E)G(E/G)(I/T)T(D/E)YAAPVKG (SEQ ID NO: 1770). In some embodiments, the CDR2 comprises RIKS(V/T)(T/S)(D/E)G(E/G)(I/T)TDYAAPVKG (SEQ ID NO: 1750). In some embodiments, the CDR2 comprises RIKSVTDGETTDYAAPVKG (SEQ ID NO:9). In some embodiments, the CDR2 comprises RIKSVTEGETTDYAAPVKG (SEQ ID NO:17). In some embodiments, the CDR2 comprises RIKSTSDGGITDYAAPVKG (SEQ ID NO:16). In some embodiments, 1, 2, 3, 4, 5, 6, 7, or 8 amino acids are substituted relative to the sequence RIKSVTDGETTDYAAPVKG (SEQ ID NO:9); or 1, 2, 3, 4, 5, 6, 7, or 8 amino acids are substituted relative to the sequence RIKSVTEGETTDYAAPVKG (SEQ ID NO:17). For example, in some embodiments, the CDR2 comprises a substituted sequence having one or more of the following positions: position 51 is V; position 54 is K or T; position 55 is S; position 56 is S; position 58 is G; position 59 is I; position 60 is K; or position 61 is E. In some embodiments, 1, 2, 3, 4, 5, 6, 7, or 8 amino acids are substituted relative to the sequence RIKSVTEGETTDYAAPVKG (SEQ ID NO:17). For example, in some embodiments, the CDR2 comprises a substituted sequence in which position 51 is V; position 54 is V, K or T; position 55 is T, position 58 is E; position 59 is T; position 60 is K; and/or position 61 is E. In some embodiments, if the CDR2 comprises a sequence in which position 56 is S, the CDR1 comprises a W at position 33. In some embodiments, the CDR2 has at least 60% identity, or at least 70% identity, to the sequence RIKSVTDGETTDYAAPVKG (SEQ ID NO:9); or at least 60% identity, or at least 70% identity, to the sequence RIKSVTEGETTDYAAPVKG (SEQ ID NO:17). In some embodiments, the CDR2 sequence has at least 80% identity, or at least 90% identity, to the sequence RIKSVTDGETTDYAAPVKG (SEQ ID NO:9) or RIKSVTEGETTDYAAPVKG (SEQ ID NO:17).

[0223] In some embodiments, an anti-tumor antibody comprises a V_{H} CDR3 sequence T(S/T)SFCCRGG(R/S)CPS(H/R)DTS(Y/F)CGG(Q/S)(Y/D)(K/N/S)(S/R)YYYMDV (SEQ ID NO: 1747). In some embodiments, the CDR3 comprises any one of the CDR3 sequences shown in Table 2. In some embodiments, the CDR3 comprises a CDR3 sequence as shown in Table 2 in which 1, 2, 3, 4, 5, 6, 7, 8, or 9 amino acids are substituted relative to the Table 2 CDR3 sequence. For example, in some embodiments, the CDR3 comprises V at position 99, T at position 100, R at position 108, D at position 111, R at position 112, Y at position 116, and/or S at position 120. In some embodiments, a V_{H} CDR3 comprises a sequence

(SEQ ID NO: 1751)
T(S/T)SFCCRGG(R/S)CPS(H/R)DTS(Y/F)CGG(Q/S)YKSYYYM
DV,
(SEQ ID NO: 1752)
T(S/T)SFCCRGG(R/S)CPS(H/R)DTS(Y/F)CGG(Q/S)DSRYYYM
DV,
(SEQ ID NO: 1753)
T(S/T)SFCCRGG(R/S)CPS(H/R)DTS(Y/F)CGG(Q/S)YNRYYYM
DV,
(SEQ ID NO: 1754)
T(S/T)SFCCRGG(R/S)CPS(H/R)DTS(Y/F)CGG(Q/S)YNSYYYM
DV,
or
(SEQ ID NO: 1755)
T(S/T)SFCCRGG(R/S)CPS(H/R)DTS(Y/F)CGG(Q/S)DKRYYYM
DV.

In some embodiments, a V_{H} CDR3 comprises a sequence

(SEQ ID NO: 1758)
T(S/T)SFCCRGGSCPSHDTS(Y/F)CGG(Q/S)YKSYYYMDV,
(SEQ ID NO: 1759)
T(S/T)SFCCRGGSCPSHDTS(Y/F)CGG(Q/S)DSRYYYMDV,
(SEQ ID NO: 1760)
T(S/T)SFCCRGGSCPSHDTS(Y/F)CGG(Q/S)YNRYYYMDV,
or
(SEQ ID NO: 1761)
T(S/T)SFCCRGGSCPSHDTS(Y/F)CGG(Q/S)DKRYYYMDV.

[0224] In some embodiments, an anti-tumor antibody of the invention comprises a heavy chain CDR1 sequence GFTFSKAWM(S/T) (SEQ ID NO: 1749). In some embodiments, the CDR1 comprises GFTFSKAWMS (SEQ ID NO:1). In alternative embodiments, the CDR1 comprises GFTFSKAWMT (SEQ ID NO:8). In some embodiments, 1, 2, or 3 amino acids are substituted relative to the sequence GFTFSKAWMS (SEQ ID NO:1) or GFTFSKAWMT (SEQ ID NO:8). For example, in some embodiments, the CDR1 comprises N at position 30, N at position 31; and/or Y at position 33. In some embodiments, the CDR1 has at least 60% identity, or at least 70% identity, at least 80% identity, or at least 90% identity to the sequence GFTFSKAWMS (SEQ ID NO:1) or GFTFSKAWMT (SEQ ID NO:8).

[0225] In some embodiments, an anti-tumor antibody of the invention comprises a heavy chain CDR2 sequence RIKS(V/T)(T/S)(D/E)G(E/G)(I/T)T(D/E)YAAPVKG (SEQ ID NO: 1770). In some embodiments, the CDR2 comprises RIKS(V/T)(T/S)(D/E)G(E/G)(I/T)TDYAAPVKG (SEQ ID NO: 1750). In some embodiments, the CDR2 comprises RIKSVTDGETTDYAAPVKG (SEQ ID NO:9). In some embodiments, the CDR2 comprises RIKSVTEGETTDYAAPVKG (SEQ ID NO:17). In some embodiments, the CDR2 comprises RIKSTSDGGITDYAAPVKG (SEQ ID NO:16). In some embodiments, 1, 2, 3, 4, 5, 6, 7, or 8 amino acids are substituted relative to the sequence RIKSVTDGETTDYAAPVKG (SEQ ID NO:9); or 1, 2, 3, 4, 5, 6, 7, or 8 amino acids are substituted relative to the sequence RIKSVTEGETTDYAAPVKG (SEQ ID NO:17). For example, in some embodiments, the CDR2 comprises a substituted sequence having one or more of the following positions: position 51 is V; position 54 is K or T; position 55 is S; position 56 is S; position 58 is G; position 59 is I; position 60 is K; or position 61 is E. In some embodiments, 1, 2, 3, 4, 5, 6, 7, or 8 amino acids are substituted relative to the sequence RIKSVTEGETTDYAAPVKG (SEQ ID NO:17). For example, in some embodiments, the CDR2 comprises a substituted sequence in which position 51 is V; position 54 is V, K or T; position 55 is T, position 58 is E; position 59 is T; position 60 is K; and/or position 61 is E. In some embodiments, if the CDR2 comprises a sequence in which position 56 is S, the CDR1 comprises a W at position 33. In some embodiments, the CDR2 has at least 60% identity, or at least 70% identity, to the sequence RIKSVTDGETTDYAAPVKG (SEQ ID NO:9); or at least 60% identity, or at least 70% identity, to the sequence RIKSVTEGETTDYAAPVKG (SEQ ID NO:17). In some embodiments, the CDR2 sequence has at least 80% identity, or at least 90% identity, to the sequence RIKSVTDGETTDYAAPVKG (SEQ ID NO:9) or RIKSVTEGETTDYAAPVKG (SEQ ID NO:17).

[0226] In some embodiments, an anti-tumor antibody comprises a V_{H} CDR3 sequence T(S/T)SFCCRGG(R/S)CPS(H/R)DTS(Y/F)CGG(Q/S)(Y/D)(K/N/S)(S/R)YYYMDV (SEQ ID NO: 1747). In some embodiments, the CDR3 comprises any one of the CDR3 sequences shown in Table 2. In some embodiments, the CDR3 comprises a CDR3 sequence as shown in Table 2 in which 1, 2, 3, 4, 5, 6, 7, 8, or 9 amino acids are substituted relative to the Table 2 CDR3 sequence. For example, in some embodiments, the CDR3 comprises V at position 99, T at position 100, R at position 108, D at position 111, R at position 112, Y at position 116, and/or S at position 120. In some embodiments, a V_{H} CDR3 comprises a sequence

(SEQ ID NO: 1751)
T(S/T)SFCCRGG(R/S)CPS(H/R)DTS(Y/F)CGG(Q/S)YKSYYYM
DV,
(SEQ ID NO: 1752)
T(S/T)SFCCRGG(R/S)CPS(H/R)DTS(Y/F)CGG(Q/S)DSRYYYM
DV,
(SEQ ID NO: 1753)
T(S/T)SFCCRGG(R/S)CPS(H/R)DTS(Y/F)CGG(Q/S)YNRYYYM
DV,
(SEQ ID NO: 1754)
T(S/T)SFCCRGG(R/S)CPS(H/R)DTS(Y/F)CGG(Q/S)YNSYYYM
DV,
or
(SEQ ID NO: 1755)
T(S/T)SFCCRGG(R/S)CPS(H/R)DTS(Y/F)CGG(Q/S)DKRYYYM
DV.

In some embodiments, a V_{H} CDR3 comprises a sequence

(SEQ ID NO: 1758)
T(S/T)SFCCRGGSCPSHDTS(Y/F)CGG(Q/S)YKSYYYMDV,
(SEQ ID NO: 1759)
T(S/T)SFCCRGGSCPSHDTS(Y/F)CGG(Q/S)DSRYYYMDV,
(SEQ ID NO: 1760)
T(S/T)SFCCRGGSCPSHDTS(Y/F)CGG(Q/S)YNRYYYMDV,
or
(SEQ ID NO: 1761)
T(S/T)SFCCRGGSCPSHDTS(Y/F)CGG(Q/S)DKRYYYMDV.

### V_{L} Regions

[0227] In some embodiments, an anti-tumor antibody of the present invention has one, two, or three CDRs of a V_{L} sequence of any one of SEQ ID NOS:123-168 as shown in Table 1A. In some embodiments, the anti-tumor antibody has at least one mutation and no more than 10, 20, 30, 40 or 50 mutations in the V_{L} amino acid sequences compared to a V_{L} sequence of any one of SEQ ID NOS:123-168. In some embodiments, the V_{L} amino acid sequence may comprise 1, 2, 3, 4, 5, 6, 7, 8, 9, or 10 amino acid insertions or deletions compared to a V_{L} sequence of any one of SEQ ID NOS:123-168. In some embodiments, the V_{L} amino acid sequence may comprise a deletion or insertion, e.g., a 1, 2, 3, 4, 5, 6, or 7 amino acid deletion or insertion, relative to a CDR sequence of a V_{L} region of any one of SEQ ID NOS:123-168. In some embodiments, the V_{L} amino acid sequence may comprise a 1-amino acid or 2-amino acid deletion or insertion relative to a CDR sequence of a V_{L} region of any one of SEQ ID NOS:123-168. In some embodiments, the V_{L} region comprises a LCDR1 having 1 or 2 substitutions in relative to a LCDR1 sequence of any one SEQ ID NOS:48-58 or 1741. In some embodiments, a LCDR1 has 3, 4, or 5 substitutions relative to a CDR1 sequence of any one SEQ ID NOS:48-58 or 1741. In some embodiments, the V_{L} region comprises a CDR2 that has 1 or 2; or 1, 2, or 3; substitutions relative to the LCDR2 sequence of any one SEQ ID NOS:59-67. In some embodiments, the V_{L} region comprises a CDR3 that has 1, 2, or 3; or 1, 2, 3, or 4; substitutions relative to a LCDR3 sequence of any one SEQ ID NOS:68-76. In some embodiments, an anti-tumor antibody of the present invention comprises a CDR1, CDR2, and CDR3, each having at least 70% identity to a CDR1, CDR2, and CDR3 to the corresponding CDR of a V_{L} region of any one of SEQ ID NOS:123-168. In some embodiments, an anti-tumor antibody of the present invention comprises a CDR1, CDR2, and CDR3, each having at least 80% identity to the corresponding CDR1, CDR2, and CDR3 of a V_{L} region of any one of SEQ ID NOS:123-168. In some embodiments, an anti-tumor antibody of the present invention comprises a CDR1, CDR2, and CDR3 of a V_{L} region of any one of SEQ ID NOS:123-168. In some embodiments, an anti-tumor antibody of the present invention comprises a CDR1, CDR2, and CDR3 of an antibody designated as AIP-158623, AIP-155066, AIP-136538, AIP-166120, AIP-133645, AIP-187893, AIP-142079, AIP-160470, AIP-104188, AIP-157397, AIP-165430, AIP-189526, AIP-192482, AIP-122563, or AIP-171142 in Table 1A.

[0228] In some embodiments, a V_{L} region of an anti-tumor antibody of the present invention has a solvent exposure of each CDR side chain, in terms of square Angstroms, as specified in this paragraph, which is based on a Fab crystal structure of an illustrative antibody. Classification as buried, intermediate, or exposed is based on cutoff values as follows: less than about 10 Ang², about 10-50 Ang², or greater than about 50 Ang², respectively. The positions are determined with reference to any one of the V_{L} region sequences of SEQ ID NOS:123-168 provided in Table 1A. Thus, in some embodiments, an anti-tumor antibody V_{L} region of the invention comprises a CDR1 in which position 23 is exposed; position 24 is intermediate; positions 25 and 26 are exposed; positions 27 and 28 are intermediate; positions 29, 30, and 31 are exposed; positions 32, 33, and 34 are intermediate; and position 35 is exposed. In some embodiments, an anti-tumor antibody V_{L} of the invention comprises a CDR2 in which positions 51, 52, 53, 54, 55, 56, and 57 are exposed. In some embodiments, an anti-tumor antibody V_{L} of the invention comprises a CDR3 in which position 90 is exposed; position 91 is buried, position 92 is exposed; position 93 is buried, positions 94, 95, 96, and 97 are exposed; position 99 is intermediate; and position 100 is exposed. In some embodiments, a residue that is classified as “buried” comprises a substitution, relative to a CDR of a V_{L} region of any one of SEQ ID NOS:123-168, that is a conservative substitution that maintains charge and approximate size to maintain antibody conformation. In some embodiments a residue classified as “exposed” is substituted, e.g., with a conservative substitution, or with a residue that provides improved binding to cancer cells compared to a parent antibody of Table 1A.

[0229] In some embodiments, an anti-tumor antibody of the invention comprises a light chain CDR1 sequence SGSSSNIGSSSVS (SEQ ID NO:48). In some embodiments, 1, 2, 3, 4, or 5 amino acids are substituted relative to the sequence SGSSSNIGSSSVS (SEQ ID NO:48). For example, in some embodiments, position 28 is Y or H. In some embodiments, position 30 is E. In some embodiments, position 32 is N. In some embodiments, position 33 is Y or F. In some embodiments, position 35 is D or E. In some embodiments, the CDR1 has at least 60% identity, at least 70% identity, at least 80% identity, or at least 90% identity to the sequence SGSSSNIGSSSVS (SEQ ID NO:48).

[0230] In some embodiments, an anti-tumor antibody of the invention comprises a light chain CDR2 sequence (K/R)(N/D)(N/D)QRPS (SEQ ID NO: 1771). In some embodiments, the CDR2 comprises a CDR2 sequence as shown in Table 1B. In some embodiments, the CDR2 comprises a CDR2 sequence KNNQRPS (SEQ ID NO:59). In some embodiments, 1, 2, or 3 amino acid are substituted relative to the sequence KNNQRPS (SEQ ID NO:59). For example, in some embodiments, position 51 is R, position 52 is D, and/or position 53 is D. in some embodiments, the CDR2 sequence has at least 60% or at least 70% identity to the sequence KNNQRPS (SEQ ID NO:59).

[0231] In some embodiments, an anti-tumor antibody of the invention comprises a V_{L} CDR3 sequence STWD(D/E)SLSV(R/W)V (SEQ ID NO: 1772). In some embodiments, the CDR3 sequence comprises STWD(D/E)SLSVRV (SEQ ID NO: 1762). In some embodiments, the CDR3 comprises a CDR3 sequence as shown in Table 1. In some embodiments, the CDR3 sequence comprises STWDDSLSVRV (SEQ ID NO:68) or STWDESLSVRV (SEQ ID NO:73). In some embodiments, 1, 2, or 3 amino acids are substituted relative to the sequence STWDDSLSVRV (SEQ ID NO:68) or STWDESLSVRV (SEQ ID NO:73). For example, in some embodiments position 90 is A, position 91 is I, and/or position 97 is G.

[0232] In some embodiments, the FR1 region of a V_{L} region of an anti-tumor antibody of the invention has at least 80% or at least 90% identity to the FR1 sequence from position 1 to 22 of a V_{L} region sequence of any one of SEQ ID NOS:123-168. In some embodiments, the FR1 region has at least 95% identity to the FR1 sequence from position 1 to 22 of a V_{L} region sequence of any one of SEQ ID NOS:123-168. In some embodiments, the FR1 comprises the amino acid sequence from positions 1 to 22 of a V_{L} region sequence of any one of SEQ ID NOS:123-168.

[0233] In some embodiments, the FR2 region of a V_{L} region of an anti-tumor antibody of the invention has at least 80% or at least 90% identity to the FR2 sequence from position 36 to 50 of a V_{L} region sequence of any one of SEQ ID NOS:123-168. In some embodiments, the FR2 region has at least 95% identity to the FR2 sequence from position 36 to 50 of a V_{L} region sequence of any one of SEQ ID NOS:123-168. In some embodiments, the FR2 comprises the amino acid sequence from positions 36 to 50 of a V_{L} region sequence of any one of SEQ ID NOS:123-168.

[0234] In some embodiments, the FR3 region of a V_{L} region of an anti-tumor antibody of the invention has at least 80% or at least 90% identity to the FR3 sequence from position 58 to 89 of a V_{L} region sequence of any one of SEQ ID NOS:123-168. In some embodiments, the FR3 region has at least 90% identity, or at least 95% identity to the FR3 sequence from position 58 to 89 of a V_{L} region sequence of any one of SEQ ID NOS:123-168. In some embodiments, the FR3 comprises the amino acid sequence from position 58 to 89 of a V_{L} region sequence of any one of SEQ ID NOS:123-168.

[0235] In some embodiments, the FR4 region a V_{H} region of comprises the amino acid sequence from position 101 to 110 of a V_{L} region sequence of any one of SEQ ID NOS:123-168. In some embodiments, the FR4 region comprises a substitution at one or two of the positions 101 to 110 relative to the corresponding sequence of a V_{L} region sequence of a V_{L} region sequence of any one of SEQ ID NOS:123-168.

[0236] In some embodiments, an anti-tumor antibody of the present invention comprises a V_{L} region CDR1, CDR2, and/or a CDR3 as described in the preceding paragraphs is this section. In some embodiments one or two of the V_{L} CDR sequences comprise a CDR sequence as shown in of a V_{L} region sequence of any one of SEQ ID NOS:123-168. In some embodiments, an anti-tumor antibody of the present invention comprises a V_{L} region CDR1, CDR2 and/or a CDR3 as described in the preceding paragraphs in this section and has at least 70% identity, at least 75% identity, at least 80% identity, or at least 85% identity, at least 90% identity, or at least 95% identity to any one of the V_{L} sequences of SEQ ID NOS:123-168. In some embodiments, the anti-tumor antibody comprises a CDR1, CDR2, and CDR3 of a V_{L} region sequence of any one of SEQ ID NOS:123-168 and has at least 70% identity, at least 75% identity, at least 80% identity, or at least 85% identity, at least 90% identity, or at least 95% identity to the corresponding V_{L} region sequence as shown in Table 1A. In some embodiments, an anti-tumor antibody comprises a CDR1, CDR2, and CDR3 of an antibody designated as AIP-158623, AIP-155066, AIP-136538, AIP-166120, AIP-133645, AIP-187893, AIP-142079, AIP-160470, AIP-104188, AIP-157397, AIP-165430, AIP-189526, AIP-192482, AIP-122563, or AIP-171142 in Table 1 and comprises at least 80%, or at least 90%, identity to the corresponding V_{L} sequence shown in Table 1A.

### Illustrative Antibodies

[0237] In some embodiments, the provided herein is an anti-tumor antibody that binds to tumor tissue through a binding interaction with an extracellular RNA-protein complex, wherein the antibody comprises heavy and light chain CDRs of an antibody of Table 1 that has an AIP designation AIP-101235, AIP-127782, AIP-189473, AIP-192571, AIP-125258, AIP-150199, AIP-115388, AIP-143369, AIP-157045, AIP-175775, AIP-154181, AIP-125984, AIP-160829, AIP-184744, AIP-128136, AIP-181273, AIP-153125, AIP-160470, AIP-192482, AIP-171142, AIP-157397, AIP-165430, AIP-189526, AIP-122563, AIP-158623, AIP-155066, AIP-136538, AIP-166120, AIP-133645, AIP-187893, AIP-142079, AIP-104188, AIP-106042, AIP-100196, AIP-180675, AIP-170105, AIP-126080, AIP-161571, AIP-181246, AIP-192216, AIP-168605, AIP-172872, AIP-190051, AIP-167533, AIP-112580, AIP-136060, or a variant thereof as described herein. In some embodiments, the antibody comprises an HCDR1 of any one of SEQ ID NOS:1-8, or a variant thereof in which 1, 2, 3, 4, or 5 amino acids are substituted relative to the sequence, an HCDR2 of any one of SEQ ID NOS:9-19, or a variant thereof in which 1, 2, 3, 4, or 5 amino acids are substituted relative to the sequence; an HCDR3 of any one of SEQ ID NOS:20-47 or a variant thereof in which 1, 2, 3, 4, 5, 6, 7, 8, 9, or 10 amino acids are substituted relative to the sequence; an LCDR1 of any one of SEQ ID NOS:48-58′ or 1741, or a variant thereof in which 1, 2, 3, 4, or 5 amino acids are substituted relative to the sequence; an LCDR2 of any one of SEQ ID NOS:59-67, or a variant thereof in which 1, 2, or 3 amino acids are substituted relative to the sequence; and an LCDR3 of any one of SEQ ID NOS:68-76, or a variant thereof in which 1, 2, 3, 4, or 5 amino acids are substituted relative to the sequence. In some embodiments, at least 1 or 2 of the substitutions are conservative substitutions. In some embodiments, at least 50% or at least 60%, at least 70%, at least 80%, or at least 90% of of the substitutions, relative to the reference CDR sequence are conservative substitutions. In some embodiments, when an antibody comprises the six CDRs of the antibody designated as AIP-192482, the sequence of the V_{H} region is not the sequence of SEQ ID NO:95 or the sequence of the V_{L} region is not the sequence of SEQ ID NO:141.

[0238] In some embodiments, the antibody comprises an HCDR1 of any one of SEQ ID NOS:1-8, or a variant thereof in which 1 or 2 amino acids are substituted relative to the sequence, an HCDR2 of any one of SEQ ID NOS:9-19, or a variant thereof in which 1 or 2 amino acids are substituted relative to the sequence; an HCDR3 of any one of SEQ ID NOS:20-47 or a variant thereof in which 1, 2, or 3; or in which 1 or 2; amino acids are substituted relative to the sequence; an LCDR1 of any one of SEQ ID NOS:48-58 or 1741, or a variant thereof in which 1 or 2 amino acids are substituted relative to the sequence; an LCDR2 of any one of SEQ ID NOS:59-67′, or a variant thereof in which 1 or 2 amino acids are substituted relative to the sequence; and an LCDR3 of any one of SEQ ID NOS:68-76, or a variant thereof in which 1 or 2 amino acids are substituted relative to the sequence. In some embodiments, at least 1 or 2 of the substitutions are conservative substitutions.

[0239] In some embodiments, provided herein is an antibody that binds to tumor tissue through a binding interaction with an extracellular RNA-protein complex, where the antibody comprises:

(a) a heavy chain variable region comprising: (i) an HCDR1 having the sequence of GF(T/V)(F/Y)(S/A)X₆AWM(S/T) (SEQ ID NO:1728), wherein X₆ is K, A, or M; (ii) an HCDR2 having the sequence of RIK(S/A)X₅X₆(D/E)(G/A)X₉X₁₀T(D/E)YAA(P/S)VKG (SEQ ID NO:1729), wherein X₅ is V, N, A, or T; X₆ is T, Q, S, D, or H; X₉ is E, H, K, or G; and X₁₀ is T, Q, or I; and (iii) an HCDR3 having the sequence of (I/T)(S/T)SFCC(H/R)(G/S)X₉X₁₀CPSX₁₄(D/E)TS(F/Y)CX₂₀(G/N)X₂₂X₂₃X₂₄X₂₅(F/Y)Y(F/Y)(M/V)(D/N)X₃₁ (SEQ ID NO:1730), wherein X₉ is A, G, K, or N; X₁₀ is N, Q, R, or S; X₁₄ is H, R, or S; X₂₀ is A, G, or N; X₂₂ is Q, S, or Y; X₂₃ is D, F, N, or Y; X₂₄ is A, K, N, P, or S; X₂₅ is D, Q, R, or S; X₃₁ is I, P, or V; and (b) a light chain variable region comprising: (i) a CDR L1 having the sequence of SG(S/A)X₄(S/T)(D/N)IGSSX₁₁VX₁₃ (SEQ ID NO:1731), wherein X₄ is S, P, or K; X₁₁ is S, Y, or T; and X₁₃ is S, Y, or T; (ii) a CDR L2 having the sequence of (K/M)(D/N)X₃X₄R(A/P)X₇, wherein X₃ is S, N or T; X₄ is L, Q, or A; and X₇ is Q, S, Y, or L; and (iii) a CDR L3 having the sequence of (A/S)(S/T)W(D/N)X₅X₆(L/N)X₇(I/V)R(I/V), wherein X₅ is E, D or N; X₆ is S, A, or Q; and X₈ is N, S or T.

[0240] In some embodiments, in the HCDR1 sequence of the antibody, position 3 of the HCDR1 is T; position 4 is F; position 5 is S; position 6 is K; and/or position 10 is S. In particular embodiments, the HCDR1 of the antibody has the sequence of GFTFSKAWMS (SEQ ID NO:1). In other embodiments, the HCDR1 of the antibody has a sequence of any one of GFTFSAAWMS (SEQ ID NO:4), GFVFSKAWMS (SEQ ID NO:7), GFTFAKAWMS (SEQ ID NO:6), GFTYSKAWMS (SEQ ID NO:5), GFTFSMAWMS (SEQ ID NO:3), GFTYSAAWMS (SEQ ID NO:2), and GFTFSKAWMT (SEQ ID NO:8).

[0241] In some embodiments, in the HCDR2 sequence of the antibody, position 4 of the HCDR2 is S; position 5 is V; position 6 is T; position 7 is D; position 8 is G; position 9 is E; position 10 is T; position 12 is D; and/or position 16 is P. In particular embodiments, the HCDR2 of the antibody has the sequence of RIKSVTDGETTDYAAPVKG (SEQ ID NO:9). In other embodiments, the HCDR2 of the antibody has a sequence of any one of

(SEQ ID NO: 18)
RIKSVTDGEQTDYAAPVKG,
(SEQ ID NO: 19)
RIKAADDGKQTDYAAPVKG,
(SEQ ID NO: 504)
RIKSVTDGETTEYAASVKG,
(SEQ ID NO: 10)
RIKAVHDGETTDYAAPVKG,
(SEQ ID NO: 11)
RIKSNTDAETTDYAAPVKG,
(SEQ ID NO: 12)
RIKSVQDGETTDYAAPVKG,
(SEQ ID NO: 13)
RIKSVTDGHTTDYAAPVKG.
(SEQ ID NO: 14)
RIKSVTDGGITDYAAPVKG,
(SEQ ID NO: 15)
RIKSTSDGETTDYAAPVKG,
(SEQ ID NO: 16)
RIKSTSDGGITDYAAPVKG,
or and
(SEQ ID NO: 17)
RIKSVTEGETTDYAAPVKG.

[0242] In some embodiments, in the HCDR3 sequence of the antibody, position 1 of the HCDR3 is T; position 2 is S; position 7 is R; position 8 is G; position 9 is G; position 10 is S; position 14 is H; position 15 is D; position 18 is Y; position 20 is G; and/or position 21 is G. In particular embodiments, the HCDR3 of the antibody has the sequence of any one of

(SEQ ID NO: 33)
TSSFCCRGGSCPSHDTSYCGGYYKSYYYMDV,
(SEQ ID NO: 21)
TSSFCCRGGSCPSHDTSYCGGQYKSYYYMDV,
and
(SEQ ID NO: 28)
TSSFCCRGGSCPSHDTSYCGGQYKSFYYMDV.

In other embodiments, the HCDR3 of the antibody has the sequence of any one of

(SEQ ID NO: 32)
TSSFCCRGGSCPSSDTSYCGGQYKSYYFMDV,
(SEQ ID NO: 30)
ISSFCCRGGSCPSRDTSYCGGQYKSYYFMDV,
(SEQ ID NO: 29)
ISSFCCRGNSCPSSDTSYCNGQYKSYYFMDV,
(SEQ ID NO: 27)
ISSFCCRGNSCPSSDTSYCNGQYKSYYYMDV,
(SEQ ID NO: 26)
ISSFCCHSNNCPSSDTSYCNGYYKQYYFMDV,
(SEQ ID NO: 25)
ISSFCCRGKQCPSSDTSYCGGQFKSYYFMDV,
(SEQ ID NO: 24)
ISSFCCRGKQCPSSDTSYCNGYYADYYFMDV,
(SEQ ID NO: 23)
TSSFCCRGNQCPSSDTSYCGGQYPSYYYMDP,
(SEQ ID NO: 22)
TTSFCCRGASCPSSDTSYCAGSYKSYYFVNI,
(SEQ ID NO: 20)
TSSFCCRSGSCPSSDTSYCNGQYKSYYYMDV,
(SEQ ID NO: 42)
TSSFCCRGGSCPSHDTSYCGGQDSRYYYMDV,
(SEQ ID NO: 41)
TSSFCCRGGSCPSHDTSFCGGSYKSYYYMDV,
(SEQ ID NO: 37)
TSSFCCRGGSCPSHDTSFCGGQYKSYYYMDV,
(SEQ ID NO: 40)
TSSFCCRGGSCPSHDTSFCGGQDSRYYYMDV,
(SEQ ID NO: 39)
TTSFCCRGGSCPSHDTSFCGGQYKSYYYMDV,
(SEQ ID NO: 34)
TSSFCCRGGSCPSHDTSFCGGQDKRYYYMDV,
(SEQ ID NO: 38)
TTSFCCRGGRCPSRDTSFCGGQYNSYYYMDV,
(SEQ ID NO: 36)
TSSFCCRGGSCPSHDTSFCGGQYNRYYYMDV,
and
(SEQ ID NO: 35)
TTSFCCRGGSCPSHDTSFCGGQDKRYYYMDV.

[0243] In some embodiments, in the LCDR1 sequence of the antibody, position 3 is S; position 4 is S; position 5 is S; position 6 is is N; position 11 is S; and/or position 13 is S. In particular embodiments, the LCDR1 of the antibody has the sequence of SGSSSNIGSSSVS (SEQ ID NO:48). In other embodiments, the LCDR1 has the sequence of any one of

(SEQ ID NO: 50)
SGSKSNIGSSYVS,
(SEQ ID NO: 56)
SGSSSNIGSSSVY,
(SEQ ID NO: 55)
SGSKSNIGSSSVY,
(SEQ ID NO: 54)
SGSSTNIGSSSVS,
(SEQ ID NO: 52)
SGASSNIGSSSVS,
(SEQ ID NO: 53)
SGSSTNIGSSTVS,
(SEQ ID NO: 51)
SGSKSNIGSSSVS,
and
(SEQ ID NO: 49)
SGSSTNIGSSSVT.

[0244] In some embodiments, in the LCDR2 sequence of the antibody, position 1 is K; position 2 is N; position 3 is N; position 4 is Q; position 6 is P; and/or position 7 is S. In particular embodiments, the LCDR2 has the sequence of KNNQRPS (SEQ ID NO:59). In other embodiments, the LCDR2 has the sequence of any one of KNNQRPY (SEQ ID NO:66), KDNQRPS (SEQ ID NO:62), KNTQRPS (SEQ ID NO:65), KNNARPY (SEQ ID NO:64), KNTQRAS (SEQ ID NO:63), MNNQRPY (SEQ ID NO:61), and KDNQRPL (SEQ ID NO:60).

[0245] In some embodiments, in the LCDR3 sequence of the antibody, position 1 of the LCDR3 is S; position 2 is T; position 4 is D; position 5 is D; position 6 is S; position 7 is L; position 8 is S; position 9 is V; and/or position 11 is V. In particular embodiments, the LCDR3 of the antibody has the sequence of STWDDSLSVRV (SEQ ID NO:68). In other embodiments, the LCDR3 has the sequence of any one of STWDDALSVRV (SEQ ID NO:72), SSWDDSNSVRI (SEQ ID NO:71), ATWDDQLSVRV (SEQ ID NO:69), ATWDDSLTVRI (SEQ ID NO:76), ATWDNSLSIRV (SEQ ID NO:70), and STWDESLSVRV (SEQ ID NO:73).

[0246] In the antibodies described herein, the HCDR1 can have a sequence of any one of GFTFSKAWMS (SEQ ID NO:1), GFTFSAAWMS (SEQ ID NO:4), and GFTFSKAWMT (SEQ ID NO:8); the HCDR2 can have a sequence of any one of RIKSVTDGETTDYAAPVKG (SEQ ID NO:9) and RIKSTSDGETTDYAAPVKG (SEQ ID NO:15); the HCDR3 can have a sequence of any one of TSSFCCRGGSCPSSDTSYCGGQYKSYYFMDV (SEQ ID NO:32), TSSFCCRSGSCPSSDTSYCNGQYKSYYYMDV (SEQ ID NO:20), TSSFCCRGNQCPSSDTSYCGGQYPSYYYMDP (SEQ ID NO:23), ISSFCCRGGSCPSRDTSYCGGQYKSYYFMDV (SEQ ID NO:30), ISSFCCRGNSCPSSDTSYCNGQYKSYYYMDV (SEQ ID NO:27), TSSFCCRGGSCPSHDTSYCGGQYKSYYYMDV (SEQ ID NO:21), and TSSFCCRGGSCPSHDTSFCGGQDKRYYYMDV (SEQ ID NO:34); the LCDR1 can have a sequence of any one of SGSSSNIGSSSVY (SEQ ID NO:56), SGSSSNIGSSSVS (SEQ ID NO:48), SGSSTNIGSSSVS (SEQ ID NO:54), and SGSKSNIGSSSVS (SEQ ID NO:51); the LCDR2 can have a sequence of any one of KNNQRPS (SEQ ID NO:59) and KDNQRPS (SEQ ID NO:62); the LCDR3 can have a sequence of any one of STWDDALSVRV (SEQ ID NO:72), STWDDSLSVRV (SEQ ID NO:68), SSWDDSNSVRI (SEQ ID NO:71), and ATWDNSLSIRV (SEQ ID NO:70).

[0247] In some embodiments, the heavy chain variable region of the antibodies described herein can have a sequence having at least 90% (e.g., 91%, 92%, 93%, 94%, 95%, 96%, 97%, 98%, 99%, or 100%) identity to the sequence of any one of

(SEQ ID NO: 92)
EVQLVESGGALVKPGGSLRLSCAASGFTFSKAWMSWVRQAPGKGLEWVGR
IKSVTDGETTDYAAPVKGRFTISRDDSKSTLYLQMNSLKTEDTAVYYCTS
SFCCRGGSCPSSDTSYCGGQYKSYYFMDVWGKGTTVTVSS,
(SEQ ID NO: 77)
EVQLVESGGALVKPGGSLRLSCAASGFTFSKAWMSWVRQAPGKGLEWVGR
IKSVTDGETTDYAAPVKGRFTISRDDSKSTLYLQMNSLKTEDTAVYYCTS
SFCCRSGSCPSSDTSYCNGQYKSYYYMDVWGKGTTVTVSS,
(SEQ ID NO: 80)
EVQLVESGGALVKPGGSLRLSCAASGFTFSKAWMSWVRQAPGKGLEWVGR
IKSVTDGETTDYAAPVKGRFTISRDDSKSTLYLQMNSLKTEDTAVYYCTS
SFCCRGNQCPSSDTSYCGGQYPSYYYMDPWGKGTTVTVSS,
(SEQ ID NO: 90)
EVQLVESGGALVKPGGSLRLSCAASGFTFSAAWMSWVRQAPGKGLEWVGR
IKSTSDGETTDYAAPVKGRFTISRDDSKSTLYLQMNSLKTEDTAVYYCIS
SFCCRGGSCPSRDTSYCGGQYKSYYFMDVWGKGTTVTVSS,
(SEQ ID NO: 86)
EVQLVESGGALVKPGGSLRLSCAASGFTFSAAWMSWVRQAPGKGLEWVGR
IKSVTDGETTDYAAPVKGRFTISRDDSKSTLYLQMNSLKTEDTAVYYCIS
SFCCRGNSCPSSDTSYCNGQYKSYYYMDVWGKGTTVTVSS,
(SEQ ID NO: 94)
EVQLVESGGALVKPGGSLRLSCAASGFTFSKAWMSWVRQAPGKGLEWVGR
IKSVTDGETTDYAAPVKGRFTISRDDSKSTLYLQMNSLKTEDTAVYYCTS
SFCCRGGSCPSHDTSYCGGQYKSYYYMDVWGKGTTVTVSS,
and
(SEQ ID NO: 95)
EVQLVESGGALVKPGGSLRLSCAASGFTFSKAWMTWVRQAPGKGLEWVGR
IKSVTDGETTDYAAPVKGRFTISRDDSKSVLYLQMSSLKTEDTAVYFCTS
SFCCRGGSCPSHDTSFCGGQDKRYYYMDVWGKGTTVTVSS.

[0248] In some embodiments, the light chain variable region of the antibodies described herein can have a sequence having at least 90% (e.g., 91%, 92%, 93%, 94%, 95%, 96%, 97%, 98%, 99%, or 100%) identity to the sequence of any one of

(SEQ ID NO: 138)
QSVLTQPPSASGTPGQRVTISCSGSSSNIGSSSVYWYQQLPGTAPKLLIY
KNNQRPSGVPDRFSGSKSGTSASLAISGLRSEDEADYYCSTWDDALSVRV
FGGGTKLTVL,
(SEQ ID NO: 140)
QSVLTQPPSASGTPGQRVTISCSGSSSNIGSSSVSWYQQLPGTAPKLLIY
KNNQRPSGVPDRFSGSKSGTSASLAISGLRSEDEADYYCSTWDDSLSVRV
FGGGTKLTVL,
(SEQ ID NO: 136)
QSVLTQPPSASGTPGQRVTISCSGSSTNIGSSSVSWYQQLPGTAPKLLIY
KDNQRPSGVPDRFSGSKSGTSASLAISGLRSEDEADYYCSSWDDSNSVRI
FGGGTKLTVL,
(SEQ ID NO: 132)
QSVLTQPPSASGTPGQRVTISCSGSKSNIGSSSVSWYQQLPGTAPKLLIY
KDNQRPSGVPDRFSGSKSGTSASLAISGLRSEDEADYYCATWDNSLSIRV
FGGGTKLTVL,
and
(SEQ ID NO: 141)
QSVLTQAPSASETPGQRVIISCSGSSSNIGSSSVSWYQQLPGTAPKLLIY
KNNQRPSGVPDRFSGSKSGTSASLAISGLRSEDEADYYCSTWDDSLSVRV
FGGGTKLTVL.

[0249] In certain embodiments, an antibody described herein can comprise an HCDR1 having a sequence of GFTFSKAWMS (SEQ ID NO:1); the HCDR2 having a sequence of RIKSVTDGETTDYAAPVKG (SEQ ID NO:9); an HCDR3 having a sequence of TSSFCCRGGSCPSSDTSYCGGQYKSYYFMDV (SEQ ID NO:32); an LCDR1 having a sequence of SGSSSNIGSSSVY (SEQ ID NO:56); an LCDR2 having a sequence of KNNQRPS (SEQ ID NO:59); and an LCDR3 having a sequence of STWDDALSVRV (SEQ ID NO:72). In some embodiments, the heavy chain variable region of the antibody has a sequence having at least 90% (e.g., 91%, 92%, 93%, 94%, 95%, 96%, 97%, 98%, 99%, or 100%) identity to the sequence of

(SEQ ID NO: 92)
EVQLVESGGALVKPGGSLR
LSCAASGFTFSKAWMSWVRQAPGKGLEWVGRIKSV
TDGETTDYAAPVKGRFTISRDDSKSTLYLQMNSLK
TEDTAVYYCTSSFCCRGGSCPSSDTSYCGGQYKSY
YFMDVWGKGTTVTVSS;

and the light chain variable region of the antibody has a sequence having at least 90% (e.g., 91%, 92%, 93%, 94%, 95%, 96%, 97%, 98%, 99%, or 100%) identity to the sequence of

(SEQ ID NO: 138)
QSVLTQPPSASGTPGQRVTISCSGSSSNIGSSSVYWYQQLPGTAPKLLIY
KNNQRPSGVPDRFSGSKSGTSASLAISGLRSEDEADYYCSTWDDALSVRV
FGGGTKLTVL.

[0250] In certain embodiments, an antibody described herein can have an HCDR1 having a sequence of GFTFSKAWMS (SEQ ID NO:1); an HCDR2 having a sequence of RIKSVTDGETTDYAAPVKG (SEQ ID NO:9); an HCDR3 having a sequence of TSSFCCRSGSCPSSDTSYCNGQYKSYYYMDV (SEQ ID NO:20); an LCDR1 having a sequence of SGSSSNIGSSSVS (SEQ ID NO:48); an LCDR2 having a sequence of KNNQRPS (SEQ ID NO:59); and an LCDR3 having a sequence of STWDDSLSVRV (SEQ ID NO:68). In some embodiments, the heavy chain variable region of the antibody has a sequence having at least 90% (e.g., 91%, 92%, 93%, 94%, 95%, 96%, 97%, 98%, 99%, or 100%) identity to the sequence of

(SEQ ID NO: 77)
EVQLVESGGALVKPGGSLRLSCAASGFTFSKAWMS
WVRQAPGKGLEWVGRIKSVTDGETTDYAAPVKGRF
TISRDDSKSTLYLQMNSLKTEDTAVYYCTSSFCCR
SGSCPSSDTSYCNGQYKSYYYMDVWGKGTTVTVSS

and the light chain variable region of the antibody has a sequence having at least 90% (e.g., 91%, 92%, 93%, 94%, 95%, 96%, 97%, 98%, 99%, or 100%) identity to the sequence of

(SEQ ID NO: 140)
QSVLTQPPSASGTPGQRVTISCSGSSSNIGSSSVSWYQQLPGTAPKLLIY
KNNQRPSGVPDRFSGSKSGTSASLAISGLRSEDEADYYCSTWDDSLSVRV
FGGGTKLTVL.

[0251] In certain embodiments, an antibody described herein can have an HCDR1 having a sequence of GFTFSKAWMS (SEQ ID NO:1); an HCDR2 having a sequence of RIKSVTDGETTDYAAPVKG (SEQ ID NO:9); an HCDR3 having a sequence of TSSFCCRGNQCPSSDTSYCGGQYPSYYYMDP (SEQ ID NO:23); an LCDR1 having a sequence of SGSSSNIGSSSVS (SEQ ID NO:48); an LCDR2 having a sequence of KNNQRPS (SEQ ID NO:59); and an LCDR3 having a sequence of STWDDSLSVRV (SEQ ID NO:68). In some embodiments, the heavy chain variable region of the antibody has a sequence having at least 90% (e.g., 91%, 92%, 93%, 94%, 95%, 96%, 97%, 98%, 99%, or 100%) identity to the sequence of

(SEQ ID NO: 80)
EVQLVESGGALVKPGGSLRLSCAASGFTFSKAWMS
WVRQAPGKGLEWVGRIKSVTDGETTDYAAPVKGRF
TISRDDSKSTLYLQMNSLKTEDTAVYYCTSSFCCR
GNQCPSSDTSYCGGQYPSYYYMDPWGKGTTVTVSS;

and the light chain variable region of the antibody has a sequence having at least 90% (e.g., 91%, 92%, 93%, 94%, 95%, 96%, 97%, 98%, 99%, or 100%) identity to the sequence of

(SEQ ID NO: 140)
QSVLTQPPSASGTPGQRVTISCSGSSSNIGSSSVSWYQQLPGTAPKLLIY
KNNQRPSGVPDRFSGSKSGTSASLAISGLRSEDEADYYCSTWDDSLSVRV
FGGGTKLTVL.

[0252] In certain embodiments, an antibody described herein can have an HCDR1 having a sequence of GFTFSAAWMS (SEQ ID NO:4); an HCDR2 having a sequence of RIKSTSDGETTDYAAPVKG (SEQ ID NO:15); an HCDR3 having a sequence of ISSFCCRGGSCPSRDTSYCGGQYKSYYFMDV (SEQ ID NO:30); an LCDR1 having a sequence of SGSSTNIGSSSVS (SEQ ID NO:54); an LCDR2 having a sequence of KDNQRPS (SEQ ID NO:62); and an LCDR3 having a sequence of SSWDDSNSVRI (SEQ ID NO:71). In some embodiments, the heavy chain variable region of the antibody has a sequence having at least 90% (e.g., 91%, 92%, 93%, 94%, 95%, 96%, 97%, 98%, 99%, or 100%) identity to the sequence of

(SEQ ID NO: 90)
EVQLVESGGALVKPGGSLRLSCAASGFTFSAAWMSWVRQAPGKGLEWV
GRIKSTSDGETTDYAAPVKGRFTISRDDSKSTLYLQMNSLKTEDTAVY
YCISSFCCRGGSCPSRDTSYCGGQYKSYYFMDVWGKGTTVTVSS;

and the light chain variable region of the antibody has a sequence having at least 90% (e.g., 91%, 92%, 93%, 94%, 95%, 96%, 97%, 98%, 99%, or 100%) identity to the sequence of

(SEQ ID NO: 136)
QSVLTQPPSASGTPGQRVTISCSGSSTNIGSSSVSWYQQLPGTAPKLLIY
KDNQRPSGVPDRFSGSKSGTSASLAISGLRSEDEADYYCSSWDDSNSVRI
FGGGTKLTVL.

[0253] In certain embodiments, an antibody described herein can have an HCDR1 having a sequence of GFTFSAAWMS (SEQ ID NO:4); an HCDR2 having a sequence of RIKSVTDGETTDYAAPVKG (SEQ ID NO:9); an HCDR3 having a sequence of ISSFCCRGNSCPSSDTSYCNGQYKSYYYMDV (SEQ ID NO:27); an LCDR1 having a sequence of SGSKSNIGSSSVS (SEQ ID NO:51); an LCDR2 having a sequence of KDNQRPS (SEQ ID NO:62); an LCDR3 having a sequence of ATWDNSLSIRV (SEQ ID NO:70). In some embodiments, the heavy chain variable region of the antibody has a sequence having at least 90% (e.g., 91%, 92%, 93%, 94%, 95%, 96%, 97%, 98%, 99%, or 100%) identity to the sequence of

(SEQ ID NO: 86)
EVQLVESGGALVKPGGSLRLSCAASGFTFSAAWMSWVRQAPGKGLEWV
GRIKSVTDGETTDYAAPVKGRFTISRDDSKSTLYLQMNSLKTEDTAVY
YCISSFCCRGNSCPSSDTSYCNGQYKSYYYMDVWGKGTTVTVSS;

and the light chain variable region of the antibody has a sequence having at least 90% (e.g., 91%, 92%, 93%, 94%, 95%, 96%, 97%, 98%, 99%, or 100%) identity to the sequence of

(SEQ ID NO: 132)
QSVLTQPPSASGTPGQRVTISCSGSKSNIGSSSVSWYQQLPGTAPKLLIY
KDNQRPSGVPDRFSGSKSGTSASLAISGLRSEDEADYYCATWDNSLSIRV
FGGGTKLTVL.

[0254] In certain embodiments, an antibody described herein can have an HCDR1 having a sequence of GFTFSKAWMS (SEQ ID NO:1); an HCDR2 having a sequence of RIKSVTDGETTDYAAPVKG (SEQ ID NO:9); an HCDR3 having a sequence of TSSFCCRGGSCPSHDTSYCGGQYKSYYYMDV (SEQ ID NO:21); an LCDR1 having a sequence of SGSSSNIGSSSVS (SEQ ID NO:48); an LCDR2 having a sequence of KNNQRPS (SEQ ID NO:59); and an LCDR3 having a sequence of STWDDSLSVRV (SEQ ID NO:68). In some embodiments, the heavy chain variable region of the antibody has a sequence having at least 90% (e.g., 91%, 92%, 93%, 94%, 95%, 96%, 97%, 98%, 99%, or 100%) identity to the sequence of

(SEQ ID NO: 94)
EVQLVESGGALVKPGGSLRLSCAASGFTFSKAWMSWVRQAPGKGLEWV
GRIKSVTDGETTDYAAPVKGRFTISRDDSKSTLYLQMNSLKTEDTAVY
YCTSSFCCRGGSCPSHDTSYCGGQYKSYYYMDVWGKGTTVTVSS;

and the light chain variable region of the antibody has a sequence having at least 90% (e.g., 91%, 92%, 93%, 94%, 95%, 96%, 97%, 98%, 99%, or 100%) identity to the sequence of

(SEQ ID NO: 140)
QSVLTQPPSASGTPGQRVTISCSGSSSNIGSSSVSWYQQLPGTAPKLLIY
KNNQRPSGVPDRFSGSKSGTSASLAISGLRSEDEADYYCSTWDDSLSVRV
FGGGTKLTVL.

[0255] In certain embodiments, an antibody described herein can have an HCDR1 having a sequence of GFTFSKAWMT (SEQ ID NO:8); an HCDR2 having a sequence of RIKSVTDGETTDYAAPVKG (SEQ ID NO:9); an HCDR3 having a sequence of TSSFCCRGGSCPSHDTSFCGGQDKRYYYMDV (SEQ ID NO:34); an LCDR1 having a sequence of SGSSSNIGSSSVS (SEQ ID NO:48); an LCDR2 having a sequence of KNNQRPS (SEQ ID NO:59); and an LCDR3 having a sequence of STWDDSLSVRV (SEQ ID NO:68). In some embodiments, the heavy chain variable region of the antibody has a sequence having at least 90% (e.g., 91%, 92%, 93%, 94%, 95%, 96%, 97%, 98%, 99%, or 100%) identity to the sequence of

(SEQ ID NO: 95)
EVQLVESGGALVKPGGSLRLSCAASGFTFSKAWMTWVRQAPGKGLEWV
GRIKSVTDGETTDYAAPVKGRFTISRDDSKSVLYLQMSSLKTEDTAVY
FCTSSFCCRGGSCPSHDTSFCGGQDKRYYYMDVWGKGTTVTVSS;

and the light chain variable region of the antibody has a sequence having at least 90% (e.g., 91%, 92%, 93%, 94%, 95%, 96%, 97%, 98%, 99%, or 100%) identity to the sequence of

(SEQ ID NO: 141)
QSVLTQAPSASETPGQRVIISCSGSSSNIGSSSVSWYQQLPGTAPKLL
IYKNNQRPSGVPDRFSGSKSGTSASLAISGLRSEDEADYYCSTWDDSL
SVRVFGGGTKLTVL.

In some embodiments, an antibody having an HCDR1 sequence of GFTFSKAWMT (SEQ ID NO:8); an HCDR2 sequence of RIKSVTDGETTDYAAPVKG (SEQ ID NO:9); an HCDR3 sequence of TSSFCCRGGSCPSHDTSFCGGQDKRYYYMDV (SEQ ID NO:34); an LCDR1 sequence of SGSSSNIGSSSVS (SEQ ID NO:48); an LCDR2 sequence of KNNQRPS (SEQ ID NO:59); and an LCDR3 having a sequence of STWDDSLSVRV (SEQ ID NO:68), has a V_{H} sequence or V_{L} sequence that differs by at least one amino acid from the heavy chain variable region sequence SEQ ID NO:95 or the light chain variable region sequence SEQ ID NO:141.

[0256] In one aspect, provided herein is an antibody comprising a V_{H} and V_{L} region as described herein, e.g., an antibody having a V_{H} and V_{L} region as set forth in Table 1, or a variant thereof, that further comprises a human IgG1 constant region and/or a human lambda constant region. In some embodiments, the antibody comprises a heavy chain sequence

(SEQ ID NO: 1721)
ASTKGPSVFPLAPSSKSTSGGTAALGCLVKDYFPEPVTVSWNSGALTS
GVHTFPAVLQSSGLYSLSSVVTVPSSSLGTQTYICNVNHKPSNTKVDK
RVEPKSCDKTHTCPPCPAPELLGGPSVFLFPPKPKDTLMISRTPEVTC
VVVDVSHEDPEVKFNWYVDGVEVHNAKTKPREEQYNSTYRVVSVLTVL
HQDWLNGKEYKCKVSNKALPAPIEKTISKAKGQPREPQVYTLPPSREE
MTKNQVSLTCLVKGFYPSDIAVEWESNGQPENNYKTTPPVLDSDGSFF
LYSKLTVDKSRWQQGNVFSCSVMHEALHNHYTQKSLSLSPG,

or a variant thereof having at least 90% identity to SEQ ID NO:1721. In some embodiments, the antibody comprises the amino acid sequence of SEQ ID NO:1721 in which 1, 2, 3, 4, 5, 6, 7, 8, 9, or 10 amino acids are mutated, e.g., to modulate FcR binding, effector function, glycosylation, and/or stability. In some embodiments, the antibody comprises a light chain sequence

(SEQ ID NO: 1722)
GQPKAAPSVTLFPPSSEELQANKATLVCLVSDFYPGAVTVAWKADGSP
VKVGVETTKPSKQSNNKYAASSYLSLTPEQWKSHRSYSCRVTHEGSTV
EKTVAPAECS.

In some embodiments, the antibody comprises a sequence having at least 90% identity, or at least 95% identity, or greater, to SEQ ID NO:1722.

[0257] In some embodiments, the V_{H} region of an antibody of the present invention has a CDR1 comprising GFTFSKAWMS (SEQ ID NO:1), a CDR2 comprising RIKSVTDGETTDYAAPVKG (SEQ ID NO:9), and a CDR3 comprising TSSFCCRGGSCPSHDTSYCGGQYKSYYYMDV (SEQ ID NO:21); and a V_{L} region having a CDR1 comprising SGSSSNIGSSSVS (SEQ ID NO:48), a CDR2 comprising KNNQRPS (SEQ ID NO:59), and a CDR3 comprising STWDDSLSVRV (SEQ ID NO:68). In some embodiments, such an antibody comprises a human IgG1 and/or a human lambda constant region. In some embodiments, the V_{H} region comprises the amino acid sequence of SEQ ID NO:94 and the V_{L} region comprises the amino acid sequence of SEQ ID NO:140. In some embodiments, the antibody comprises a heavy chain sequence

(SEQ ID NO: 1721)
ASTKGPSVFPLAPSSKSTSGGTAALGCLVKDYFPEPVTVSWNSGALTS
GVHTFPAVLQSSGLYSLSSVVTVPSSSLGTQTYICNVNHKPSNTKVDK
RVEPKSCDKTHTCPPCPAPELLGGPSVFLFPPKPKDTLMISRTPEVTC
VVVDVSHEDPEVKFNWYVDGVEVHNAKTKPREEQYNSTYRVVSVLTVL
HQDWLNGKEYKCKVSNKALPAPIEKTISKAKGQPREPQVYTLPPSREE
MTKNQVSLTCLVKGFYPSDIAVEWESNGQPENNYKTTPPVLDSDGSFF
LYSKLTVDKSRWQQGNVFSCSVMHEALHNHYTQKSLSLSPG,

or a variant thereof having at least 90% identity to SEQ ID NO:1721. In some embodiments, the antibody comprises the amino acid sequence of SEQ ID NO:1721 in which 1, 2, 3, 4, 5, 6, 7, 8, 9, or 10 amino acids are mutated, e.g., to modulate FcR binding, effector function, glycosylation, and/or stability. In some embodiments, the antibody comprises a light chain sequence

(SEQ ID NO: 1722)
GQPKAAPSVTLFPPSSEELQANKATLVCLVSDFYPGAVTVAWKADGSP
VKVGVETTKPSKQSNNKYAASSYLSLTPEQWKSHRSYSCRVTHEGSTV
EKTVAPAECS.

In some embodiments, the antibody comprises a sequence having at least 90% identity, or at least 95% identity, or greater, to SEQ ID NO:1722. In some embodiments, an antibody of the present invention comprises a heavy chain sequence

(SEQ ID NO: 1723)
EVQLVESGGALVKPGGSLRLSCAASGFTFSKAWMSWVRQAPGKGLEWV
GRIKSVTDGETTDYAAPVKGRFTISRDDSKSTLYLQMNSLKTEDTAVY
YCTSSFCCRGGSCPSHDTSYCGGQYKSYYYMDVWGKGTTVTVSSASTK
GPSVFPLAPSSKSTSGGTAALGCLVKDYFPEPVTVSWNSGALTSGVHT
FPAVLQSSGLYSLSSVVTVPSSSLGTQTYICNVNHKPSNTKVDKRVEP
KSCDKTHTCPPCPAPELLGGPSVFLFPPKPKDTLMISRTPEVTCVVVD
VSHEDPEVKFNWYVDGVEVHNAKTKPREEQYNSTYRVVSVLTVLHQDW
LNGKEYKCKVSNKALPAPIEKTISKAKGQPREPQVYTLPPSREEMTKN
QVSLTCLVKGFYPSDIAVEWESNGQPENNYKTTPPVLDSDGSFFLYSK
LTVDKSRWQQGNVFSCSVMHEALHNHYTQKSLSLSPG

and a light chain sequence

(SEQ ID NO: 1724)
QSVLTQPPSASGTPGQRVTISCSGSSSNIGSSSVSWYQQLPGTAPKLLIY
KNNQRPSGVPDRFSGSKSGTSASLAISGLRSEDEADYYCSTWDDSLSVRV
FGGGTKLTVLGQPKAAPSVTLFPPSSEELQANKATLVCLVSDFYPGAVTV
AWKADGSPVKVGVETTKPSKQSNNKYAASSYLSLTPEQWKSHRSYSCRVT
HEGSTVEKTVAPAECS.

[0258] In one aspect, provided herein is an antibody comprising a V_{H} and V_{L} region as described herein, e.g., an antibody having a V_{H} and V_{L} region as set forth in Table 1A, or a variant thereof, that further comprises a human IgG1 constant region and/or a human lambda constant region. In some embodiments, the antibody comprises a heavy chain sequence

(SEQ ID NO: 1721)
ASTKGPSVFPLAPSSKSTSGGTAALGCLVKDYFPEPVTVSWNSGALTS
GVHTFPAVLQSSGLYSLSSVVTVPSSSLGTQTYICNVNHKPSNTKVDK
RVEPKSCDKTHTCPPCPAPELLGGPSVFLFPPKPKDTLMISRTPEVTC
VVVDVSHEDPEVKFNWYVDGVEVHNAKTKPREEQYNSTYRVVSVLTVL
HQDWLNGKEYKCKVSNKALPAPIEKTISKAKGQPREPQVYTLPPSREE
MTKNQVSLTCLVKGFYPSDIAVEWESNGQPENNYKTTPPVLDSDGSFF
LYSKLTVDKSRWQQGNVFSCSVMHEALHNHYTQKSLSLSPG,

or a variant thereof having at least 90% identity to SEQ ID NO:1721. In some embodiments, the antibody comprises the amino acid sequence of SEQ ID NO:1721 in which 1, 2, 3, 4, 5, 6, 7, 8, 9, or 10 amino acids are mutated, e.g., to modulate FcR binding, effector function, glycosylation, and/or stability. In some embodiments, the antibody comprises a light chain sequence

(SEQ ID NO: 1722)
GQPKAAPSVTLFPPSSEELQANKATLVCLVSDFYPGAVTVAWKADGSP
VKVGVETTKPSKQSNNKYAASSYLSLTPEQWKSHRSYSCRVTHEGSTV
EKTVAPAECS.

In some embodiments, the antibody comprises a sequence having at least 90% identity, or at least 95% identity, or greater, to SEQ ID NO:1722.

[0259] In some embodiments, the V_{H} region of an antibody of the present invention has a CDR1 comprising GFTFSKAWMS (SEQ ID NO:1), a CDR2 comprising RIKSVTDGETTDYAAPVKG (SEQ ID NO:9), and a CDR3 comprising TSSFCCRGGSCPSHDTSYCGGQYKSYYYMDV (SEQ ID NO:21); and a V_{L} region having a CDR1 comprising SGSSSNIGSSSVS (SEQ ID NO:48), a CDR2 comprising KNNQRPS (SEQ ID NO:59), and a CDR3 comprising STWDDSLSVRV (SEQ ID NO:68). In some embodiments, such an antibody comprises a human IgG1 and/or a human lambda constant region. In some embodiments, the V_{H} region comprises the amino acid sequence of SEQ ID NO:8 and the V_{L} region comprises the amino acid sequence of SEQ ID NO:29. In some embodiments, the antibody comprises a heavy chain sequence

(SEQ ID NO: 1721)
ASTKGPSVFPLAPSSKSTSGGTAALGCLVKDYFPEPVTVSWNSGALTS
GVHTFPAVLQSSGLYSLSSVVTVPSSSLGTQTYICNVNHKPSNTKVDK
RVEPKSCDKTHTCPPCPAPELLGGPSVFLFPPKPKDTLMISRTPEVTC
VVVDVSHEDPEVKFNWYVDGVEVHNAKTKPREEQYNSTYRVVSVLTVL
HQDWLNGKEYKCKVSNKALPAPIEKTISKAKGQPREPQVYTLPPSREE
MTKNQVSLTCLVKGFYPSDIAVEWESNGQPENNYKTTPPVLDSDGSFF
LYSKLTVDKSRWQQGNVFSCSVMHEALHNHYTQKSLSLSPG,

or a variant thereof having at least 90% identity to SEQ ID NO:43. In some embodiments, the antibody comprises the amino acid sequence of SEQ ID NO:43 in which 1, 2, 3, 4, 5, 6, 7, 8, 9, or 10 amino acids are mutated, e.g., to modulate FcR binding, effector function, glycosylation, and/or stability. In some embodiments, the antibody comprises a light chain sequence

(SEQ ID NO: 1722)
GQPKAAPSVTLFPPSSEELQANKATLVCLVSDFYPGAVTVAWKADGSP
VKVGVETTKPSKQSNNKYAASSYLSLTPEQWKSHRSYSCRVTHEGSTV
EKTVAPAECS.

In some embodiments, the antibody comprises a sequence having at least 90% identity, or at least 95% identity, or greater, to SEQ ID NO:1722.

### Variant Binding Activity

### Activity

[0260] A variant of an antibody that is useful for binding to tumor tissue through a binding interaction with an extracellular RNA-protein complex and/or for inducing an immune response, including an anti-tumor immune response, can be identified using a variety of assays. In a preferred embodiment, the binding target of the tumor-binding antibodies as described herein is present extracellularly by tumor cells when they are grown in vivo, but not present extracellulary for tumor cells grown under standard culture conditions in vitro. Binding assays to assess variant activity are therefore performed on tumor tissues or tumor cells ex vivo, e.g., on tumor cells that were grown as a tumor graft in a syngeneic (immune-matched) mouse in vivo then harvested and processed within 24-48 hrs. Binding can be assessed by any number of means including flow cytometry. However, in the present application, a tumor-binding antibody, when provided in a format that comprises an Fc region that binds to an FcγRIIa, also has the ability to engage the FcγRIIa. In one assay, variant binding activity is evaluated in an Fc receptor engagement assay. For purposes of testing variants, “engagement” of an Fc receptor occurs when a variant antibody binds to both a target tumor cell via its Fv region and an FcγR present on an immune cell via the antibody Fc region in such as manner so as to transduce a signal. If the Fc region is kept constant among variants that differ in their Fv regions, then the assay allows an evaluation of tumor binding activity across such variants in the context of potential signal transduction through a particular Fc region binding a particular Fc receptor. In some embodiments, binding of the antibody Fc region can result in clustering and/or internalization of the FcR, resulting in a luminescence signal in cells harboring a NFAT-RE-Luciferase reporter construct.

[0261] In a preferred assay, binding activity of a variant antibody is assessed using ex vivo tumor cells as described above in an FcγRIIa engagement assay. In certain embodiments, binding of the antibody to both its target and FcγR leads to signal generation. In such an assay, EC₅₀ values are determined and in some embodiments, a delta activity value is also determined, as described below. In an illustrative assay, variants can be tested in a FcγRIIa-H Promega reporter assay. Other assays are also available, e.g., BPS Bioscience provides a similar assay using a CD32a reporter cell line. Alternative assays include using a CD16a reporter cell line and are available from either Promega or Invivogen.

[0262] The following assay is preferably used to measure the binding activity of antibodies that specifically bind to tumor-expressed target and activate FcγRIIa. This assay, the FcγRIIa-H ADCP assay, is available from Promega and employs Jurkat cells stably expressing human FcγRIIa-H (the high-affinity H131 variant) and NFAT-induced luciferase. Following engagement of an FcγR on Jurkat effector cells by the Fc region of a test antibody binding to a target cell, intracellular signals are generated in the Jurkat cells that result in NFAT-RE-mediated luciferase activity, which can be quantified. The assay used to analyze variants is detailed in the “Detailed Methodology” section below. The assay can be performed as further detailed below.

[0263] Binding activity is assessed by determining EC₅₀ values, and in some embodiments additionally determining delta activity, i.e., the difference in specific activity between lower and upper plateaus of the activation curve expressed as percent of activity of a selected antibody having known in vitro activity (see also, Example 8). In typical embodiments, EC₅₀ values are compared to a reference antibody. For purposes of this disclosure, an antibody comprising the V_{H} and V_{L} regions of AIP-160470 and a mouse IgG2a Fc region when testing ex vivo binding using a mouse tumor model, is employed as a reference antibody and included in an assay to assess variant activity relative to the reference antibody. The fold over EC₅₀ is calculated by dividing the EC₅₀ of the reference antibody by the EC₅₀ of the test antibody. Based on the resulting values, the antibodies were assigned to groups and given a ranking from 0-4 as follows: 0=(>500 nM); 1=<0.5; 2=0.5 to 2; 3=2 to 4; 4=>4.

[0264] The protocol for each step is provided below.

### Inoculation and Growth of EMT6 Tumors in Balb/c Mice In Vivo

[0265] 1. Suspend EMT6 cells in Waymouth's media without FBS to achieve 5×10⁶ cells/ml

[0266] a. 1 T225 cell culture flask will yield around 18-24×10⁶ viable cells

2. Keep cells on ice for remainder of the procedure
3. Anaesthetize female, 8 week old BALB/c mice using isoflurane inhalation
Using a 1 ml syringe with 25 G needle, inject 200 μl cell suspension (1×10⁶ cells total) subcutaneously into the shaved left flank of a mouse, ensuring that cells are not lost by reflux back into the syringe or leakage from the injection site during injection.
5. Check cell counts and viability after inoculation has been performed

[0267] a. Should be in a 10% window

6. Monitor tumor growth using calipers

### Harvest EMT6 Tumors and Preparation of Ex Vivo Cell Bank

[0268] 1. Harvest tumors once they reach 500-800 mm³ as measured with calipers
2. Remove all surrounding skin and muscle
3. Transfer tumors into RPMI media on ice, containing Primocin at 1/500 dilution (100 μg/mL) 4.
(Tumors can be pooled and volumes scaled up proportionately)
5. Prepare Tumor Digestion Mix (per 1 tumor)
a. 3.3 ml HBSS w Ca²⁺Mg²⁺
b. 33 μl Collagenase A (final concentration: 0.2 mg/ml)
c. 33 μl Dispase II (final concentration: 0.8 mg/ml)
d. 17 μl DNase (final concentration: 0.02 mg/ml)

### e. 6.6μl Primocin

[0269] f. Mix and filter through 0.22 micron cellulose acetate filter to sterilize
6. Recover tumors from RPMI. Cut tumors into small pieces and add 1 ml digestion mix per tumor 7. Incubate in either FACS tube with cap, 15, or 50 ml screwcap tube at 37° C. continuously rotating for 15 min
8. Allow cells to settle for 30 seconds
9. Carefully remove supernatant with 1 ml pipette and add to 3 ml of pure FBS on ice, containing Primocin at concentration of 100 μg/mL
10. Add another 1 ml of digestion mix and repeat 2× for a total of 3×
11. (you can cut the top off a 1 ml pipette tip and use it for mechanical dissociation in between the digestion steps)
12. After the last digestion, the cell suspension should pass through a 1 ml micropipette tip
13. Filter collected cells in FBS through 100 micron cell strainer into a new 50 ml tube

### 14. Spin, 300×g, 4° C., 10 min

[0270] 15. Remove supernatant and resuspend cells in 1 ml pure FBS (with Primocin at 100 μg/mL)
16. Count and adjust cells to 6×10⁶ cells/ml with FBS (with Primocin at 100 μg/mL)
a. Due to debris, cell counts with the Countess II or a Hemocytometer can be inaccurate i.
Staining of nucleated cells with 1:1000 Draq5 (5 mM stock concentration) and counting on a flow cytometer in the APC channel is recommended
ii. Addition of DAPI at 1:1000 allows for live cell gating of the nucleated population (Violet laser required)
1. Prepare staining solution by adding 1 μl of Draq5 (5 mM stock) and 1 μl of DAPI to 1 ml of PBS
2. Add 40 μl staining solution to a round bottom 96 well 3. Add 10 μl cell suspension and mix well
4. Incubate for 5 min at room temperature in the dark
5. Analyze sample by flow
a. Gate on Draq5 (APC channel) positive cells first
b. Determine DAPI (BV421 channel) negative cells within the Draq5 positive population
6. If flow cytometer can measure events/μl, you can calculate the cell number directly (Cytflex can do that)
7. If flow cytometer cannot measure events/μl (like most BD instruments), you would need to add counting beads to get cell counts
b. Viability should be above 75%
17. Resuspend cells at 4×10⁶ cells/ml with FBS (with Primocin at 100 μg/mL)
18. Add equal amount of FBS containing 20% DMSO and 100 μg/mL Primocin
19. Mix well by pipetting up and down
20. Aliquot 1 ml (2×10⁶ cells) of cell suspension into cryo tubes and freeze at −80° C.
a. Expected number of cells ˜10×10⁶ cells/tumor
21. Transfer to long-term liquid N₂ storage the next day
a. Thaw 1 sample vial according to the protocol “Thawing of ex vivo cells” b. Control cell counts

### Use of Ex Vivo EMT6 Cells for Engagement Assay

### Thawing Ex Vivo Cells

[0271] 1. Thaw a vial in the 37° C. water bath
2. Transfer the contents of the vial to a 50 ml conical tube
3. Add 19 mL of RPMI+2% FBS to the cells drop-by-drop, while swirling the suspension

### 4. Spin, 300×g, 4° C., 5 min

### 5. Resuspend in 1 mL PBS+2% FBS+2 mM EDTA

### 6. Spin, 300×g, 4° C., 5 min

### 7. Resuspend in 2 mL Assay Buffer (RPMI1640+4% Low IgG Serum)

### 8. Resuspend in 1 ml Assay Buffer

[0272] 9. Count and adjust cells to 0.5×10⁶ cells/m1 in Assay Buffer
a. Perform cell count as described in Section C; 16a

### FcγRIIa Engagement Assay (Promega Kit #G9991)

[0273] 1. Prepare antibody serial dilutions in Assay Buffer at 1.5×excess.
a. 75 μl total assay volume
b. 10⁻⁶M starting concentration
c. log dilutions in a 6 point dose response curve in triplicates
2. add 25 μl of the antibody dilution to a white, flat bottom 96 well plate.
a. use only inner 60 wells
b. Fill unused wells with 75 μl assay buffer
3. Add 25 ul ex vivo cells to each well containing antibody dilution
a. Gently tap the plate to mix cells with antibody
4. Incubate for 15 minutes at 37° C., 5% CO2.
5. Thaw a vial of FcγRIIa-H Effector cells (0.62 mL)(Promega kit 3G991) in the 37° C. water bath
a. Remove vial from 37° C. as soon as it is thawed
6. Transfer the contents of the vial to a conical tube containing 5.3 mL of Assay Buffer
7. Mix by inverting the tube 4-5 times
8. Count and adjust cells to 0.5×10⁶ cells/ml
a. Cell counts can be performed using a regular cell counter or hemocytometer 9. Add 25 μl of the FcγRIIa-H effector cells to the opsonized target cells
a. E:T ratio of 1:1
10. Gently shake the plates back and forth to mix the contents (75 μl total volume)
11. Incubate for 5 hours at 37° C., 5% CO2
12. After 5 hours, prepare the Bio-Glo Luciferase solution by adding the whole bottle of Bio-Glo™
Assay Buffer to the Bio-Glo Luciferase Assay substrate (10 mL total per kit).
13. remove plate from incubator
14. Add 75 ul of the Bio-Glo™ mix to each reaction well
15. Incubate at RT in the dark for 15 minutes
16. Measure luminescence in a suitable plate reader
17. Plot curves and calculate EC50 values

### Reagents and Buffers

### EMT6 Complete Media (Normal Growth Media, NGM)

[0274] Waymouth's MB 752/1 Medium+2 mM L-glutamine+15% fetal bovine serum (FBS)+1% pen/strep

### Assay Buffer

[0275] RPMI1640+4% low IgG fetal bovine serum (FBS)

### Collagenase A (Sigma-Aldrich, #10103586001)

[0276] 1. Add HBSS with Ca²⁺Mg²⁺ to create a stock solution of 50 mg/ml
2. Invert tube multiple times
3. Incubate for 5 min at room temperature
4. Aliquot into 1.5 ml snap-cap tube
5. Store at −20° C. for up to month
6. Avoid repeating freeze/thaw cycles

### Dispase II (Sigma-Aldrich, #D4693-1G)

[0277] 1. Reconstitute 1 g of Dispase II in 10 mL molecular biology grade water with 10 mM Sodium Acetate (pH 7.5) and 5 mM Calcium Acetate
2. Invert tube multiple times
3. Incubate for 60 min at room temperature
4. Aliquot into 1.5 ml snap-cap tube
5. Store at 4° C. for up to month

### DNAse (Sigma-Aldrich, #4536282001)

[0278] 1. Add HBSS with Ca²⁺Mg²⁺ to create a stock solution of 2 mg/ml
2. Invert tube multiple times
3. Incubate for 5 min at room temperature
4. Aliquot into 1.5 ml snap-cap tube
5. Store at −20° C. for up to 7 days
6. Avoid repeating freeze/thaw cycles

[0279] An antibody can also be tested for anti-tumor function in vivo using an in vivo assay as described in the EXAMPLES section. A variant of an antibody as described herein typically has at least 50%, or at least 60%, or 70%, or greater, of the anti-tumor activity of a reference antibody as shown in Table 1 when evaluated under the same assay conditions to measure the anti-tumor activity in vivo. In some embodiments, an anti-tumor antibody exhibits improved activity, i.e., greater than 100% activity, compared to the reference antibody.

### Antibody Binding Target

[0280] In one aspect, provided herein is an anti-tumor antibody that binds to tumor tissue. In some embodiments, an antibody of the present invention targets an extracellular RNA-protein complex that comprises mRNA and further comprises an mRNA binding protein. In typical embodiments, the tumor-binding antibody binds through a binding interaction with an extracellular RNA-protein complex. In some embodiments, the RNA-protein complex comprises polyadenylated RNA. In some embodiments, the RNA-protein complex comprises mRNA. Such a complex may also comprise other types of RNA such as ribosomal RNA and/or microRNA and/or long-noncoding RNA. In some embodiments, the RNA-protein complex comprises polyadenylated RNA and/or pre-mRNA. In some embodiments, the antibody binds directly to an RNA binding protein present in the RNA protein complex. In other embodiments, the antibody may bind a protein that interacts with an RNA binding protein. In other embodiments, binding of the antibody to the protein is dependent on RNA. In some embodiments, the antibody may bind simultaneously to RNA and a protein. In some embodiments, the antibody may bind to RNA. In other embodiments, binding of the antibody to RNA may be dependent on one or more RNA binding proteins bound to the RNA or be dependent on multiple proteins binding the RNA in a protein complex.

[0281] In some embodiments, an anti-tumor antibody provided herein binds to an extracellular RNA-protein complex that comprises one, two, three, or more proteins set forth in Table 3. In some embodiments, the extracellular RNA-protein complex comprises a polyadenylate binding protein family member, as further described below. In some embodiments, the extracellular RNA-protein complex comprises a polyadenylate binding protein family member and additional proteins, e.g., one or more proteins set forth in Table 3. In some embodiments, the antibody binds to a protein set forth in Table 3. In some embodiments, the protein is an RNA binding protein such as a polyadenylate binding protein family member, as further described below. In some embodiments, the tumor-binding antibody provided herein binds to an extracellular RNA-protein complex that comprises at one or more proteins selected from the following: ABCF1, ACIN1, ACLY, ADAR, AGO1, AGO2, AGO3, AHNAK, ATP2A2, ATXN2, BAG2, BOP1, BUB3, CAD, CASC3, CDCSL, CELF1, CLTA, CNBP, COPA, CRNKL1, DARS, DDX17, DDX18, DDX21, DDX5, DDX54, DDX6, DHX15, DHX30, DHX36, DHX57, DHX9, DICER1, DKC1, DNTTIP2, EDC4, EEF1D, EEF2, EFTUD2, EIF2AK2, EIF2S1, EIF3D, EIF3E, EIF3I, EIF4A3, EIF4G1, EIF6, ELAVL1, EPRS, FAM120A, FBL, FMR1, FTSJ3, FUBP3, FUS, FXR1, FXR2, GAR1, GEMIN4, GNL3, GRSF1, GTPBP4, HEATR1, HIST1H1B, HIST1H1C, HIST1H3A, HNRNPA0, HNRNPA1, HNRNPA2B1, HNRNPA3, HNRNPAB, HNRNPC, HNRNPD, HNRNPDL, HNRNPF, HNRNPH1, HNRNPH3, HNRNPK, HNRNPL, HNRNPM, HNRNPR, HNRNPUL1, HNRNPUL2, IGF2BP1, IGF2BP2, IGF2BP3, ILF2, ILF3, KARS, KHDRBS1, L1RE1, LARP1, MAGOHB, MAK16, MAP1B, MATR3, MBNL1, MOV10, MRTO4, MVP, MYBBP1A, MYO1B, NAT10, NCL, NHP2, NIFK, NKRF, NOL11, NOL6, NOP2, NOP56, NOP58, PABPC1, PABPC4, PCBP2, PDCD11, PES1, PGD, PLEC, PPP1CB, PRKDC, PRKRA, PRPF19, PRPF4B, PRPF8, PRRC2C, PTBP1, PTBP3, PURA, PURB, PWP1, PWP2, RAB14, RAB2A, RACK1, RALY, RAN, RBM14, RBM34, RBM4, RBM45, RBM8A, RBMX, RCC2, RPL10A, RPL11, RPL12, RPL13A, RPL14, RPL15, RPL17, RPL18, RPL18A, RPL19, RPL21, RPL22, RPL23, RPL23A, RPL24, RPL26, RPL27, RPL29, RPL3, RPL30, RPL32, RPL34, RPL35A, RPL36, RPL4, RPL5, RPL6, RPL7, RPL7A, RPL8, RPLP0, RPLP1, RPLP2, RPS11, RPS13, RPS17, RPS23, RPS24, RPS26, RPS27A, RPS3, RPS3A, RPSS, RPS6, RPS8, RPS9, RPSA, RRBP1, RRP1, RRP9, RRS1, RSL1D1, RTCB, RUVBL2, RYDEN, SART3, SF3B3, SKIV2L2, SLC3A2, SND1, SNRNP200, SNRNP70, SNRPB, SNRPD1, SNRPD2, SNRPD3, SON, SRP68, SRP72, SRPK1, SRPK2, SRRM2, SRSF1, SRSF10, SRSF2, SRSF3, SRSF6, SRSF7, SRSF9, SSB, STAU1, STAU2, STRAP, SYNCRIP, TARBP2, TARDBP, TCOF1, TCP1, THOC2, THOC6, TNRC6A, TOP1, TRA2A, TRA2B, TRIM25, TRIM56, TTN, U2AF2, UGDH, UPF1, UTP15, UTP18, UTP4, UTP6, WDR12, WDR36, WDR43, WDR46, WDR74, WDR75, XAB2, XRCC5, XRN2, YBX1, YBX3, YTHDC2, ZC3H7A, ZC3HAV1, ZCCHC3, and ZNF326.

[0282] In some embodiments, the polyadenylate binding protein family member is “polyadenylate-binding protein 1”, also referred to as “poly(A) binding protein 1”, (PABP-1) and RNA, e.g., poly(A)-containing RNA. PABP-1 associates with the 3′ poly(A) tail of mRNA and is highly conserved among eukaryotic organisms. PABP-1 is encoded by the poly(A) binding protein cytoplasmic 1 (PABPC1) gene (see, e.g., the human PABPC1 gene sequence available under NCBI Ref. Sequence NM_002568.4). For purposes of the present invention, “PABPC1” is used interchangeably with “PABP-1” in referring to the polypeptide. Human PABPC1 polypeptide sequence information is available under UniProtKB accesson number P11940. Two isoforms produced by alternative splicing have been described. Isoform 1 is considered the canonical sequence and is 636 amino acids in length (see, e.g., NCBI Ref. Sequence NP_002559.2). Isoform 2 differs from the canonical sequence in that amino acids 447-553 are missing. A “human PABPC1 polypeptide” as used herein includes any PABPC1 polypeptide encoded by a human PABPC1 gene, which is localized to human chromosome 8q22.2-q23.

[0283] In some embodiments, provided herein is an antibody that targets a complex that comprises RNA, PABPC1, and/or additional RNA binding proteins to elicit an immune response and/or an anti-tumor response. Illustrative examples of additional RNA binding proteins that may be contained in such complexes include PABP family members, such as PABP-4 (also referred to as PABPC4). In some embodiments, the complex may comprise one or more proteins selected from the group consisting of the proteins listed in Table 3. In some embodiments, the one or more proteins are RNA binding proteins.

[0284] In some embodiments, a complex that comprises RNA and PABPC1, or RNA and PABPC1 and/or additional RNA binding proteins is a component of a ribonucleoprotein (RNP)-RNA condensate, which is a large, disordered configuration of denatured RNPs that form non-specific associations with one another and RNA to form a large assemblage that phase-separates to form distinguishable droplets (see, e.g., Hyman et al., Annu Rev. Cell Dev. Biol. 30:39-58, 2014). Thus, in some embodiments, an antibody that targets a complex comprising PABPC1 is administered to a patient having a tumor that contains ribonucleoprotein (RNP)-RNA condensate droplets that comprise the target RNA-PABPC1 complex.

[0285] In some embodiments, a complex that comprises RNA and PABPC1, or RNA and PABPC1 and/or additional RNA binding proteins is a component of a biomolecular condensate. Biomolecular condensates are two- and three dimensional compartments that concentrate specific collections of distinct molecules without an encapsulating membrane (Ditlev et al., J. Mol. Biol. 430: 4666-4684, 2018; Mullard, Nature Reviews 18:325, 2019). Thus, in some embodiments, an antibody that targets a complex comprising PABPC1 is administered to a patient having a tumor that contains a biomolecular condensate that comprises the target RNA-PABPC1 complex.

[0286] In some embodiments, a complex that comprises RNA and PABPC1, or RNA and PABPC1 and/or additional RNA binding proteins is a component of a stress granule or otherwise complexed with a stress granule. A “stress granule” as used herein refers to a non-membrane bound assembly or granule, typically formed in the cytoplasm, that is increased following stress. In some cases, stress granules form when cells shut off general protein synthesis in response to stress by, e.g., inhibiting translation and releasing mRNAs from disassembled polysomes into discrete cytoplasmic foci. Stress granules may comprise messenger ribonucleoproteins (mRNPs), including mRNA, small 40S ribosomal subunits, mRNA-associated translation inhibition complexes, and RNA-binding proteins. These stress granule proteins may determine the fate of specific transcripts that shuttle in and out of the stress granule, and also modulate various signaling cascades in stressed cells. PABPC1 is one of proteins that have been identified in stress granules (Aulas et al., J. of Cell Science, 130: 927-937, 2017). Thus, in some embodiments, an antibody that targets a complex comprising PABPC1 is administered to a patient having a tumor that contains stress granules that comprise the target RNA-PABPC1 complex.

[0287] In some embodiments, the ribonucleoprotein (RNP)-RNA condensate droplet, the stress granule, and/or the biomolecular condensate comprising the target RNA-PABPC1 complex comprises one or more proteins selected from Table 3. In some embodiments, the stress granules comprise one or more stress granule proteins selected from proteins in the group 1, 2, 3, or 4 in Table 3.

[0288] In some embodiments, the ribonucleoprotein (RNP)-RNA condensate droplet, the stress granule, and/or the biomolecular condensate comprising the target RNA-PABPC1 complex further comprise one or more oncofetal proteins. Non-limiting examples of oncofetal proteins include IGF2BP1 and IGF2BP3.

[0289] In some embodiments, the ribonucleoprotein (RNP)-RNA condensate droplet, the stress granule, and/or the biomolecular condensate comprising the target RNA-PABPC1 complex further comprise a cancer antigen, e.g., a cancer-testis antigen. One exemplary cancer-testis antigen is IGF2BP2.

[0290] In some embodiments, a complex that comprises RNA and PABPC1, or RNA and PABPC1 and/or additional RNA binding proteins is found extracellularly, e.g., the ribonucleoprotein (RNP)-RNA condensate droplet, granule, and/or biomolecular condensate (as described above) containing or bound to the target RNA-PABPC1 complex is outside of the cell. Thus, in some embodiments, an antibody that targets a complex comprising PABPC1 is administered to a patient having a tumor that has an extracellular complex comprising the target RNA-PABPC1 complex. In some embodiments, the patient is a mammal, e.g., a human.

[0291] In a further aspect, provided herein an antibody, e.g., having anti-tumor activity, that targets an RNA-protein complex that comprises a poly(A+) binding protein (PABP) closely related to PABPC1. Such RNA binding proteins are described, e.g., in Eliseeva et al, Biochemistry 78:1377-1391, 2013. These include six human poly(A+) binding proteins, which can be grouped as follows: cytoplasmic (PABPC3, PABPC4, PABPC4L (and PABPC1)), embryonic (ePABP, also referred to as PABPC1L), nuclear (PABPN1), and the X chromosome-encoded protein PABPC5. The gene encoding ePABP (also called PABPC1L) is on human chromosome 20. The PABPC1L protein has about 98% homology to PABPC1. The gene encoding PABPC3 is localized to 13q12-q13. The PABC3 protein (631 amino acids) has about 100% homology to the PABPC1 protein (636 amino acids). The gene encoding PABPC4 (there are three known isoforms) is localized to 1p34.2. All three PABPC4 isoforms have about 99% homology to PABPC1. The gene encoding PABC4L is localized to 4q28.3. The PABC4L protein has about 63% homology to PABPC1. The gene encoding PABPN1 is localized to 14q11.2. The PABPN1 protein has about 30% homology to PABPC1. The gene encoding PABPC5 is localized to Xq21.3. The PABPC5 protein has about 61% homology to PABPC1. The domain structure of these proteins comprises one or more RNA recognition motifs. Cytoplasmic PABPs have four such domains, typically in the N-terminal region. The C-terminal region of PABPC1, PABPC1L, PABPC3, and PABC4 contains a helical domain composed of five α-helices. The nuclear protein PABPN1 has only one RNA recognition motif.

### RNA-PABPC4 Complexes

[0292] In some embodiments, provided herein is an antibody that targets a complex that comprises RNA and PABPC4 to elicit an anti-tumor response. In some embodiments, the complex comprises additional RNA binding proteins. In some embodiments, the complex is a component of a ribonucleoprotein (RNP)-RNA condensate. Thus, in some embodiments, an antibody that targets a complex comprising PABPC4 is administered to a patient having a tumor that contains ribonucleoprotein (RNP)-RNA condensate droplets that comprise the target RNA-PABPC4 complex.

[0293] In some embodiments, a complex that comprises RNA and PABPC4, which may further comprise additional RNA binding proteins, is a component of a biomolecular condensate. Thus, in some embodiments, an antibody that targets a complex comprising PABPC4 is administered to a patient having a tumor that contains a biomolecular condensate that comprises the target RNA-PABPC4 complex.

[0294] In some embodiments, a complex that comprises RNA and PABPC4, which may further comprise additional RNA binding proteins, is a component of a stress granule or otherwise complexed with a stress granule. Thus, in some embodiments, an antibody that targets a complex comprising PABPC4 is administered to a patient having a tumor that contains stress granules that comprise the target RNA-PABPC4 complex.

[0295] In some embodiments, the ribonucleoprotein (RNP)-RNA condensate droplet, the stress granule, and/or the biomolecular condensate comprising the target RNA-PABPC4 complex comprises one or more proteins selected from Table 5. In some embodiments, the stress granules comprise one or more stress granule proteins selected from proteins in the group 1, 2, 3, or 4 in Table 5.

[0296] In some embodiments, the ribonucleoprotein (RNP)-RNA condensate droplet, the stress granule, and/or the biomolecular condensate comprising a target RNA-PABPC4 complex further comprise one or more oncofetal proteins. Non-limiting examples of oncofetal proteins include IGF2BP1 and IGF2BP3.

[0297] In some embodiments, the ribonucleoprotein (RNP)-RNA condensate droplet, the stress granule, and/or the biomolecular condensate comprising a target RNA-PABPC4 complex further comprise a cancer antigen, e.g., a cancer-testis antigen. One exemplary cancer-testis antigen is IGF2BP2.

[0298] In some embodiments, a complex that comprises RNA and PABPC4, which may further comprise additional RNA binding proteins, is found extracellularly, e.g., the ribonucleoprotein (RNP)-RNA condensate droplet, granule, and/or biomolecular condensate (as described above) containing or bound to the target RNA-PABPC4 complex is outside of the cell. Thus, in some embodiments, an antibody that targets a complex comprising PABPC4 is administered to a patient having a tumor that has an extracellular complex comprising the target RNA-PABPC4 complex. In some embodiments, the patient is a mammal, e.g., a human.

### RNA-PABPC3 Complexes

[0299] In some embodiments, provided herein is an antibody that targets a complex that comprises RNA and PABPC3 to elicit an anti-tumor response. In some embodiments, the complex comprises additional RNA binding proteins. In some embodiments, the complex is a component of a ribonucleoprotein (RNP)-RNA condensate. Thus, in some embodiments, an antibody that targets a complex comprising PABPC3 is administered to a patient having a tumor that contains ribonucleoprotein (RNP)-RNA condensate droplets that comprise the target RNA-PABPC3 complex.

[0300] In some embodiments, a complex that comprises RNA and PABPC3, which may further comprise additional RNA binding proteins, is a component of a biomolecular condensate. Thus, in some embodiments, an antibody that targets a complex comprising PABPC3 is administered to a patient having a tumor that contains a biomolecular condensate that comprises the target RNA-PABPC3 complex.

[0301] In some embodiments, a complex that comprises RNA and PABPC3, which may further comprise additional RNA binding proteins, is a component of a stress granule or otherwise complexed with a stress granule. Thus, in some embodiments, an antibody that targets a complex comprising PABPC3 is administered to a patient having a tumor that contains stress granules that comprise the target RNA-PABPC3 complex.

[0302] In some embodiments, the ribonucleoprotein (RNP)-RNA condensate droplet, the stress granule, and/or the biomolecular condensate comprising the target RNA-PABPC3 complex comprises one or more proteins selected from Table 5. In some embodiments, the stress granules comprise one or more stress granule proteins selected from proteins in the group 1, 2, 3, or 4 in Table 5.

[0303] In some embodiments, the ribonucleoprotein (RNP)-RNA condensate droplet, the stress granule, and/or the biomolecular condensate comprising a target RNA-PABPC3 complex further comprise one or more oncofetal proteins. Non-limiting examples of oncofetal proteins include IGF2BP1 and IGF2BP3.

[0304] In some embodiments, the ribonucleoprotein (RNP)-RNA condensate droplet, the stress granule, and/or the biomolecular condensate comprising a target RNA-PABPC3 complex further comprise a cancer antigen, e.g., a cancer-testis antigen. One exemplary cancer-testis antigen is IGF2BP2.

[0305] In some embodiments, a complex that comprises RNA and PABPC3, which may further comprise additional RNA binding proteins, is found extracellularly, e.g., the ribonucleoprotein (RNP)-RNA condensate droplet, granule, and/or biomolecular condensate (as described above) containing or bound to the target RNA-PABPC3 complex is outside of the cell. Thus, in some embodiments, an antibody that targets a complex comprising PABPC3 is administered to a patient having a tumor that has an extracellular complex comprising the target RNA-PABPC3 complex. In some embodiments, the patient is a mammal, e.g., a human.

### RNA-PABPC4L Complexes

[0306] In some embodiments, provided herein is an antibody that targets a complex that comprises RNA and PABPC4L to elicit an anti-tumor response. In some embodiments, the complex comprises additional RNA binding proteins. In some embodiments, the complex is a component of a ribonucleoprotein (RNP)-RNA condensate. Thus, in some embodiments, an antibody that targets a complex comprising PABPC4L is administered to a patient having a tumor that contains ribonucleoprotein (RNP)-RNA condensate droplets that comprise the target RNA-PABPC4L complex.

[0307] In some embodiments, a complex that comprises RNA and PABPC4L, which may further comprise additional RNA binding proteins, is a component of a biomolecular condensate. Thus, in some embodiments, an antibody that targets a complex comprising PABPC4L is administered to a patient having a tumor that contains a biomolecular condensate that comprises the target RNA-PABPC4L complex.

[0308] In some embodiments, a complex that comprises RNA and PABPC4L, which may further comprise additional RNA binding proteins, is a component of a stress granule or otherwise complexed with a stress granule. Thus, in some embodiments, an antibody that targets a complex comprising PABPC4L is administered to a patient having a tumor that contains stress granules that comprise the target RNA-PABPC4L complex.

[0309] In some embodiments, the ribonucleoprotein (RNP)-RNA condensate droplet, the stress granule, and/or the biomolecular condensate comprising the target RNA-PABPC4L complex comprises one or more proteins selected from Table 5. In some embodiments, the stress granules comprise one or more stress granule proteins selected from proteins in the group 1, 2, 3, or 4 in Table 5.

[0310] In some embodiments, the ribonucleoprotein (RNP)-RNA condensate droplet, the stress granule, and/or the biomolecular condensate comprising a target RNA-PABPC4L complex further comprise one or more oncofetal proteins. Non-limiting examples of oncofetal proteins include IGF2BP1 and IGF2BP3.

[0311] In some embodiments, the ribonucleoprotein (RNP)-RNA condensate droplet, the stress granule, and/or the biomolecular condensate comprising a target RNA-PABPC4L complex further comprise a cancer antigen, e.g., a cancer-testis antigen. One exemplary cancer-testis antigen is IGF2BP2.

[0312] In some embodiments, a complex that comprises RNA and PABPC4L, which may further comprise additional RNA binding proteins, is found extracellularly, e.g., the ribonucleoprotein (RNP)-RNA condensate droplet, granule, and/or biomolecular condensate (as described above) containing or bound to the target RNA-PABPC4L complex is outside of the cell. Thus, in some embodiments, an antibody that targets a complex comprising PABPC4L is administered to a patient having a tumor that has an extracellular complex comprising the target RNA-PABPC4L complex. In some embodiments, the patient is a mammal, e.g., a human.

### RNA-ePABP Complexes

[0313] In some embodiments, provided herein is an antibody that targets a complex that comprises RNA and ePABP to elicit an anti-tumor response. In some embodiments, the complex comprises additional RNA binding proteins. In some embodiments, the complex is a component of a ribonucleoprotein (RNP)-RNA condensate. Thus, in some embodiments, an antibody that targets a complex comprising ePABP is administered to a patient having a tumor that contains ribonucleoprotein (RNP)-RNA condensate droplets that comprise the target RNA-ePABP complex.

[0314] In some embodiments, a complex that comprises RNA and ePABP, which may further comprise additional RNA binding proteins, is a component of a biomolecular condensate. Thus, in some embodiments, an antibody that targets a complex comprising ePABP is administered to a patient having a tumor that contains a biomolecular condensate that comprises the target RNA-ePABP complex.

[0315] In some embodiments, a complex that comprises RNA and ePABP, which may further comprise additional RNA binding proteins, is a component of a stress granule or otherwise complexed with a stress granule. Thus, in some embodiments, an antibody that targets a complex comprising ePABP is administered to a patient having a tumor that contains stress granules that comprise the target RNA-ePABP complex.

[0316] In some embodiments, the ribonucleoprotein (RNP)-RNA condensate droplet, the stress granule, and/or the biomolecular condensate comprising the target RNA-ePABP complex comprises one or more proteins selected from Table 5. In some embodiments, the stress granules comprise one or more stress granule proteins selected from proteins in the group 1, 2, 3, or 4 in Table 5.

[0317] In some embodiments, the ribonucleoprotein (RNP)-RNA condensate droplet, the stress granule, and/or the biomolecular condensate comprising a target RNA-ePABP complex further comprise one or more oncofetal proteins. Non-limiting examples of oncofetal proteins include IGF2BP1 and IGF2BP3.

[0318] In some embodiments, the ribonucleoprotein (RNP)-RNA condensate droplet, the stress granule, and/or the biomolecular condensate comprising a target RNA-ePABP complex further comprise a cancer antigen, e.g., a cancer-testis antigen. One exemplary cancer-testis antigen is IGF2BP2.

[0319] In some embodiments, a complex that comprises RNA and ePABP, which may further comprise additional RNA binding proteins, is found extracellularly, e.g., the ribonucleoprotein (RNP)-RNA condensate droplet, granule, and/or biomolecular condensate (as described above) containing or bound to the target RNA-ePABP complex is outside of the cell. Thus, in some embodiments, an antibody that targets a complex comprising ePABP is administered to a patient having a tumor that has an extracellular complex comprising the target RNA-ePABP complex. In some embodiments, the patient is a mammal, e.g., a human.

### RNA-PABPN1 Complexes

[0320] In some embodiments, provided herein is an antibody that targets a complex that comprises RNA and PABPN1 to elicit an anti-tumor response. In some embodiments, the complex comprises additional RNA binding proteins. In some embodiments, the complex is a component of a ribonucleoprotein (RNP)-RNA condensate. Thus, in some embodiments, an antibody that targets a complex comprising PABPN1 is administered to a patient having a tumor that contains ribonucleoprotein (RNP)-RNA condensate droplets that comprise the target RNA-PABPN1 complex.

[0321] In some embodiments, a complex that comprises RNA and PABPN1, which may further comprise additional RNA binding proteins, is a component of a biomolecular condensate. Thus, in some embodiments, an antibody that targets a complex comprising PABPN1 is administered to a patient having a tumor that contains a biomolecular condensate that comprises the target RNA-PABPN1 complex.

[0322] In some embodiments, a complex that comprises RNA and PABPN1, which may further comprise additional RNA binding proteins, is a component of a stress granule or otherwise complexed with a stress granule. Thus, in some embodiments, an antibody that targets a complex comprising PABPN1 is administered to a patient having a tumor that contains stress granules that comprise the target RNA-PABPN1 complex.

[0323] In some embodiments, the ribonucleoprotein (RNP)-RNA condensate droplet, the stress granule, and/or the biomolecular condensate comprising the target RNA-PABPN1 complex comprises one or more proteins selected from Table 5. In some embodiments, the stress granules comprise one or more stress granule proteins selected from proteins in the group 1, 2, 3, or 4 in Table 5.

[0324] In some embodiments, the ribonucleoprotein (RNP)-RNA condensate droplet, the stress granule, and/or the biomolecular condensate comprising a target RNA-PABPN1 complex further comprise one or more oncofetal proteins. Non-limiting examples of oncofetal proteins include IGF2BP1 and IGF2BP3.

[0325] In some embodiments, the ribonucleoprotein (RNP)-RNA condensate droplet, the stress granule, and/or the biomolecular condensate comprising a target RNA-PABPN1 complex further comprise a cancer antigen, e.g., a cancer-testis antigen. One exemplary cancer-testis antigen is IGF2BP2.

[0326] In some embodiments, a complex that comprises RNA and PABPN1, which may further comprise additional RNA binding proteins, is found extracellularly, e.g., the ribonucleoprotein (RNP)-RNA condensate droplet, granule, and/or biomolecular condensate (as described above) containing or bound to the target RNA-PABPN1 complex is outside of the cell. Thus, in some embodiments, an antibody that targets a complex comprising PABPN1 is administered to a patient having a tumor that has an extracellular complex comprising the target RNA-ePABP complex. In some embodiments, the patient is a mammal, e.g., a human.

### RNA-PABPC5 Complexes

[0327] In some embodiments, provided herein is an antibody that targets a complex that comprises RNA and PABPC5 to elicit an anti-tumor response. In some embodiments, the complex comprises additional RNA binding proteins. In some embodiments, the complex is a component of a ribonucleoprotein (RNP)-RNA condensate. Thus, in some embodiments, an antibody that targets a complex comprising PABPC5 is administered to a patient having a tumor that contains ribonucleoprotein (RNP)-RNA condensate droplets that comprise the target RNA-PABPC5 complex.

[0328] In some embodiments, a complex that comprises RNA and PABPC5, which may further comprise additional RNA binding proteins, is a component of a biomolecular condensate. Thus, in some embodiments, an antibody that targets a complex comprising PABPC5 is administered to a patient having a tumor that contains a biomolecular condensate that comprises the target RNA-PABPC5 complex.

[0329] In some embodiments, a complex that comprises RNA and PABPC5, which may further comprise additional RNA binding proteins, is a component of a stress granule or otherwise complexed with a stress granule. Thus, in some embodiments, an antibody that targets a complex comprising PABPC5 is administered to a patient having a tumor that contains stress granules that comprise the target RNA-PABPC5 complex.

[0330] In some embodiments, the ribonucleoprotein (RNP)-RNA condensate droplet, the stress granule, and/or the biomolecular condensate comprising the target RNA-PABPC5 complex comprises one or more proteins selected from Table 5. In some embodiments, the stress granules comprise one or more stress granule proteins selected from proteins in the group 1, 2, 3, or 4 in Table 5.

[0331] In some embodiments, the ribonucleoprotein (RNP)-RNA condensate droplet, the stress granule, and/or the biomolecular condensate comprising a target RNA-PABPC5 complex further comprise one or more oncofetal proteins. Non-limiting examples of oncofetal proteins include IGF2BP1 and IGF2BP3.

[0332] In some embodiments, the ribonucleoprotein (RNP)-RNA condensate droplet, the stress granule, and/or the biomolecular condensate comprising a target RNA-PABPC5 complex further comprise a cancer antigen, e.g., a cancer-testis antigen. One exemplary cancer-testis antigen is IGF2BP2.

[0333] In some embodiments, a complex that comprises RNA and PABPC5, which may further comprise additional RNA binding proteins, is found extracellularly, e.g., the ribonucleoprotein (RNP)-RNA condensate droplet, granule, and/or biomolecular condensate (as described above) containing or bound to the target RNA-PABPC5 complex is outside of the cell. Thus, in some embodiments, an antibody that targets a complex comprising PABPC5 is administered to a patient having a tumor that has an extracellular complex comprising the target RNA-PABPC5 complex. In some embodiments, the patient is a mammal, e.g., a human.

### RNA-PABP Vaccines

[0334] In some embodiments, a complex comprising RNA and one or more RNA binding proteins, e.g., PABPs, e.g., one or more of PABC1, PABPC3, PABPC4, PABC4L, ePABP, PABPN1, and/or PABPC5, is administered as a component of a cancer vaccine. In some embodiments, such a complex is co-administered with an immunomodulating agent, e.g., an adjuvant. Examples of immunomodulating agents include, but are not limited to, cytokines, growth factors, lymphotoxins, tumor necrosis factor (TNF), hematopoietic factors, interleukins (e.g., interleukin-1 (IL-1), IL-2, IL-3, IL-6, IL-10, IL-12, IL-15, an IL-15/IL-15Rα, e.g., sushi domain, complex, IL-18, and IL-21), colony stimulating factors (e.g., granulocyte-colony stimulating factor (G-CSF) and granulocyte macrophage-colony stimulating factor (GM-CSF), interferons (e.g., interferon-α, -β or -γ), erythropoietin and thrombopoietin, or a combination thereof. In some embodiments, the complex may be co-administered with an adjuvant, such as a Toll-like receptor (TLR) agonist, a C-type lectin receptor (CLR) agonist, a retinoic acid-inducible gene I-like receptor (RLR) agonist, a saponin, a polysaccharide such as chitin, chitosan, β-glucan, an ISCOM, QS-21, a stimulator of interferon genes (STING) agonist, or another immunopotentiating agent.

### Antibody Formats

[0335] In a further aspect of the invention, an anti-tumor antibody in accordance with the disclosure may be an antibody fragment, e.g., a Fv, Fab, Fab′, scFv, diabody, or F(ab′)₂ fragment. In another embodiment, the antibody is a substantially full length antibody, e.g., an IgG antibody or other antibody class or isotype as defined herein. For a review of certain antibody fragments, see Hudson et al. Nat. Med. 9: 129-134 (2003). Antibody fragments can be made by various techniques, including but not limited to proteolytic digestion of an intact antibody as well as production by recombinant host cells.

[0336] In some embodiments, an anti-tumor antibody according to the present invention that is administered to a patient is an IgG of the IgG1 subclass. In some embodiments, such an antibody has a lambda light chain constant region.

[0337] In some embodiments an anti-tumor antibody in accordance with the present disclosure is in a monovalent format. In some embodiments, the anti-tumor antibody is in a fragment format, e.g., a Fv, Fab, Fab′, scFv, diabody, or F(ab′)₂ fragment.

[0338] In some embodiments, an antibody of the present disclosure comprises an Fc region that has effector function, e.g., exhibits antibody-dependent cellular cytotoxicity (ADCC), antibody-dependent cellular phagocytosis (ADCP), and/or complement-dependent cytotoxicity (CDC). In some embodiments, the Fc region may be an Fc region engineered to alter one or more functional properties of the antibody, such as serum half-life, complement fixation, Fc receptor binding, and/or ADCC. Accordingly, an Fc region can comprise additional mutations to increase or decrease effector functions, i.e., the ability to induce certain biological functions upon binding to an Fc receptor expressed on an immune cell. Immune cells include, but are not limited to, monocytes, macrophages, neutrophils, dendritic cells, eosinophils, mast cells, platelets, B cells, large granular lymphocytes, Langerhans' cells, natural killer (NK) cells, and cytotoxic T cells.

[0339] Examples of effector functions include, but are not limited to, C1q binding and CDC, Fc receptor binding (e.g., FcγR binding), ADCC, antibody-dependent cell-mediated phagocytosis (ADCP), down-regulation of cell surface receptors (e.g., B cell receptor), and B-cell activation. Effector functions may vary with the antibody class. For example, native human IgG1 and IgG3 antibodies can elicit ADCC and CDC activities upon binding to an appropriate Fc receptor present on an immune system cell; and native human IgG1, IgG2, IgG3, and IgG4 can elicit ADCP functions upon binding to the appropriate Fc receptor present on an immune cell.

[0340] In some embodiments, an Fc region described herein can include additional modifications that modulate effector function. Examples of Fc region amino acid mutations that modulate an effector function include, but are not limited to, one or more substitutions at positions 228, 233, 234, 235, 236, 237, 238, 239, 243, 265, 269, 270, 297, 298, 318, 326, 327, 329, 330, 331, 332, 333, and 334 (EU numbering scheme) of an Fc region.

[0341] Illustrative substitutions that decrease effector functions include the following: position 329 may have a mutation in which proline is substituted with a glycine or arginine or an amino acid residue large enough to destroy the Fc/Fcγ receptor interface that is formed between proline 329 of the Fc and tryptophan residues Trp 87 and Trp 110 of FcγRIII Additional illustrative substitutions that decrease effector functions include S228P, E233P, L235E, N297A, N297D, and P331S. Multiple substitutions may also be present, e.g., L234A and L235A of a human IgG1 Fc region; L234A, L235A, and P329G of a human IgG1 Fc region; S228P and L235E of a human IgG4 Fc region; L234A and G237A of a human IgG1 Fc region; L234A, L235A, and G237A of a human IgG1 Fc region; V234A and G237A of a human IgG2 Fc region; L235A, G237A, and E318A of a human IgG4 Fc region; and S228P and L236E of a human IgG4 Fc region, to decrease effectors functions. Examples of substitutions that increase effector functions include, e.g., E333A, K326W/E333S, S239D/I332E/G236A, S239D/A330L/I332E, F243L, G236A, and S298A/E333A/K334A. Descriptions of amino acid mutations in an Fc region that can increase or decrease effector functions can be found in, e.g., Wang et al., Protein Cell. 9(1): 63-73, 2018; Saunders, Front Immunol. June 7, eCollection, 2019; Kellner et al., Transfus Med Hemother. 44(5): 327-336, 2017; and Lo et al., J Biol Chem. 292(9):3900-3908, 2017.

[0342] In some embodiments, an Fc region may have one or more amino acid substitutions that modulate ADCC, e.g., substitutions at positions 298, 333, and/or 334 of the Fc region, according to the EU numbering scheme. Specifically, S298A, E333A, and K334A can be introduced to an Fc region to increase the affinity of the Fc region to FcγRIIIa and decrease the affinity of the Fc region to FcγRIIa and FcγRIIb.

[0343] An Fc region can also comprise additional mutations to increase serum half-life. Through enhanced binding to the neonatal Fc receptor (FcRn), such mutations in an Fc region can improve the pharmacokientics of the antibody. Examples of substitutions in an Fc region that increase the serum half-life of an antibody include, e.g., M252Y/S254T/T256E, T250Q/M428L, N434A, N434H, T307A/E380A/N434A, M428L/N434S, M252Y/M428L, D2591/V308F, N434S, V308W, V308Y, and V308F. Descriptions of amino acid mutations in an Fc region that can increase the serum half-life of an antibody can be found in, e.g., Dumet et al., MAbs. 26:1-10, 2019; Booth et al., MAbs. 10(7):1098-1110, 2018; and Dall'Acqua et al., J Biol Chem. 281(33):23514-24, 2006.

[0344] Furthermore, in some embodiments, an antibody of the disclosure may be chemically modified (e.g., one or more chemical moieties can be attached to the antibody) or be modified, e.g., produced in cell lines and/or in cell culture conditions to alter its glycosylation (e.g., hypofucosylation, afucosylation, or increased sialylation), to alter one or more functional properties of the antibody. For example, the antibody can be linked to one of a variety of polymers, for example, polyethylene glycol. In some embodiments, an antibody may comprises mutations to facilitate linkage to a chemical moiety and/or to alter residues that are subject to post-translational modifications, e.g., glycosylation.

[0345] In some embodiments, an anti-tumor antibody of the present invention is employed in a bispecific or multi-specific format, e.g., a tri-specific format. For example, in some embodiments, the antibody may be incorporated into a bispecific or multi-specific antibody that comprises a further binding domain that binds to the same or a different antigen.

[0346] Illustrative antigens that can be targeted by a further binding domain in a bispecific or multi-specific antibody that comprises a heavy and/or light chain variable domain of the present invention, include, but are not limited to, antigens on T cells to enhance T cell engagement and/or activate T cells. Illustrative examples of such an antigen include, but are not limited to, CD3, CD2, CD4, CD5, CD6, CD8, CD28, CD40L, CD44, IL-15Rα, CD122, CD132, or CD25. In some embodiments, the antigen is CD3. In some embodiments, the antigen is in a T cell activating pathway, such as a 4-1BB/CD137, CD137L, OX40, OX40L, GITRL, GITR, CD27, CD70, CD28, ICOS, HVEM, or LIGHT antigen.

[0347] In some embodiments, a bispecific or multispecific antibody comprising a heavy and/or light chain variable region of the present invention further comprises a binding domain that binds to a checkpoint antigen, PD1, PDL1, CTLA-4, ICOS, PDL2, IDOL IDO2, B7-H3, B7-H4, BTLA, HVEM, TIM3, GALS, GITR, HAVCR2, LAG3, KIR, LAIR1, LIGHT, MARCO, OX-40, SLAM, 2B4, CD2, CD27, CD28, CD30, CD40, CD70, CD80, CD86, CD137, CD160, CD39, VISTA, TIGIT, CGEN-15049, 2B4, CHK 1, CHK2, A2aR, or a B-7 family ligand or its receptor.

[0348] In some embodiments, a bispecific or multispecific antibody comprising a heavy and/or light chain variable region of the present invention further comprises a binding domain that targets a tumor-associated antigen. Illustrative tumor-associate antigens include, but are not limited to, EpCAM, HER2/neu, HER3/neu, G250, CEA, MAGE, proteoglycans, VEGF, VEGFREGFR, ErbB2, ErbB3, MET, IGF-1R, PSA, PSMA, EphA2, EphA3, EphA4, folate binding protein αVβ3-integrin, integrin α5β1 HLA, HLA-DR, ASC, CD1, CD2, CD4, CD6, CD7, CD8, CD1 1, CD1 3, CD14, CD19, CD20, CD21, CD22, CD23, CD24, CD30, CD33, CD37, CD40, CD41, CD47, CD52, c-erb-2, CALLA, MHCII, CD44v3, CD44v6, p97, ganglioside GM1, GM2, GM3, GD1 a, GD1 b, GD2, GD3, GT1 b, GT3, GQ1, NY-ESO-1, NFX2, SSX2, SSX4 Trp2, gp100, tyrosinase, Muc-1, telomerase, survivin, SLAMF7 EphG250, p53, CA125 MUC, Wue antigen, Lewis Y antigen, HSP-27, HSP-70, HSP-72, HSP-90, Pgp, PMEL17, MCSP, and cell surface targets GC182, GT468 or GT512.

[0349] In some embodiments, heavy and light chain variable regions of an anti-tumor antibody of the present invention may be incorporated into a chimeric antigen receptor construct, to generate a CAR-containing immune cell such as a T-cell or NK-cell. For example, in some embodiments, a first generation CAR joins a single-chain variable region from the antibody to a CD3zeta (ζ) intracellular signaling domain of a CD3 T-cell receptor through hinge and transmembrane domains. In some embodiments, the CAR may contain co-stimulating domains, e.g., a second or third generation CAR may include an additional one or two-co-stimulating domains, such as 4-1BB, CD28, or OX-40). In additional embodiments, a CAR-containing cell, e.g., a CAR-T cell, may additionally be engineered to with an inducible expression component such as a cytokine, e.g., IL-12 or IL-15 to increase activation of CAR-T cells and also activate innate immune cells.

### Generation of Antibodies

[0350] Anti-tumor antibodies as disclosed herein are commonly produced using vectors and recombinant methodology well known in the art (see, e.g., Sambrook & Russell, Molecular Cloning: A Laboratory Manual, Cold Spring Harbor Laboratory Press; Ausubel, Current Protocols in Molecular Biology). Reagents, cloning vectors, and kits for genetic manipulation are available from commercial vendors. Accordingly, in a further aspect of the invention, provided herein are isolated nucleic acids encoding a V_{H} and/or V_{L} region, or fragment thereof, of any of the anti-tumor antibodies as described herein; vectors comprising such nucleic acids and host cells into which the nucleic acids are introduced that are used to replicate the antibody-encoding nucleic acids and/or to express the antibodies. Such nucleic acids may encode an amino acid sequence containing the V_{L} and/or an amino acid sequence containing the V_{H} of the anti-tumor antibody (e.g., the light and/or heavy chains of the antibody). In some embodiments, the host cell contains (1) a vector containing a polynucleotide that encodes the V_{L} amino acid sequence and a polynucleotide that encodes the V_{H} amino acid sequence, or (2) a first vector containing a polynucleotide that encodes the V_{L} amino acid sequence and a second vector containing a polynucleotide that encodes the V_{H} amino acid sequence.

[0351] In a further aspect, the invention provides a method of making an anti-tumor antibody as described herein. In some embodiments, the method includes culturing a host cell as described in the preceding paragraph under conditions suitable for expression of the antibody. In some embodiments, the antibody is subsequently recovered from the host cell (or host cell culture medium).

[0352] Suitable vectors containing polynucleotides encoding antibodies of the present disclosure, or fragments thereof, include cloning vectors and expression vectors. While the cloning vector selected may vary according to the host cell intended to be used, useful cloning vectors generally have the ability to self-replicate, may possess a single target for a particular restriction endonuclease, and/or may carry genes for a marker that can be used in selecting clones containing the vector. Examples include plasmids and bacterial viruses, e.g., pUC18, pUC19, Bluescript (e.g., pBS SK+) and its derivatives, mp18, mp19, pBR322, pMB9, ColE1 plasmids, pCR1, RP4, phage DNAs, and shuttle vectors. These and many other cloning vectors are available from commercial vendors.

[0353] Expression vectors generally are replicable polynucleotide constructs that contain a nucleic acid of the present disclosure. The expression vector may replicable in the host cells either as episomes or as an integral part of the chromosomal DNA. Suitable expression vectors include but are not limited to plasmids and viral vectors, including adenoviruses, adeno-associated viruses, retroviruses, and any other vector.

[0354] Suitable host cells for expressing an anti-tumor antibody as described herein include both prokaryotic or eukaryotic cells. For example, an anti-tumor antibody may be produced in bacteria, in particular when glycosylation and Fc effector function are not needed. After expression, the antibody may be isolated from the bacterial cell paste in a soluble fraction and can be further purified. Alternatively, the host cell may be a eukaryotic host cell, including eukaryotic microorganisms, such as filamentous fungi or yeast, including fungi and yeast strains whose glycosylation pathways have been “humanized,” resulting in the production of an antibody with a partially or fully human glycosylation pattern, vertebrate, invertebrate, and plant cells. Examples of invertebrate cells include insect cells. Numerous baculoviral strains have been identified which may be used in conjunction with insect cells. Plant cell cultures can also be utilized as host cells.

[0355] In some embodiments, vertebrate host cells are used for producing an anti-tumor antibody of the present disclosure. For example, mammalian cell lines such as a monkey kidney CV1 line transformed by SV40 (COS-7); human embryonic kidney line (293 or 293 cells as described, e.g., in Graham et al., J. Gen Virol. 36:59, 1977; baby hamster kidney cells (BHK); mouse sertoli cells (TM4 cells as described, e.g., in Mather, Biol. Reprod. 23:243-251, 1980 monkey kidney cells (CV1); African green monkey kidney cells (VERO-76); human cervical carcinoma cells (HELA); canine kidney cells (MDCK; buffalo rat liver cells (BRL 3A); human lung cells (W138); human liver cells (Hep G2); mouse mammary tumor (MMT 060562); TRI cells, as described, e.g., in Mather et al., Annals N.Y. Acad. Sci. 383:44-68, 1982; MRC 5 cells; and FS4 cells may be used to express an anti-tumor antibodies. Other useful mammalian host cell lines include Chinese hamster ovary (CHO) cells, including DHFR-CHO cells (Urlaub et al., Proc. Natl. Acad. Sci. USA 77:4216, 1980); and myeloma cell lines such as Y0, NS0 and Sp2/0. Host cells of the present disclosure also include, without limitation, isolated cells, in vitro cultured cells, and ex vivo cultured cells. For a review of certain mammalian host cell lines suitable for antibody production, see, e.g., Yazaki and Wu, Methods in Molecular Biology, Vol. 248 (B. K. C. Lo, ed., Humana Press, Totowa, N.J.), pp. 255-268, 2003.

[0356] In some embodiments, an antibody of the present invention is produced by a CHO cell line, e.g., the CHO-K1 cell line. One or more expression plasmids can be introduced that encode heavy and light chain sequences. For example, in one embodiment, an expression plasmid encoding a heavy chain, e.g., SEQ ID NO:1723, and an expression plasmid encoding a light chain, e.g., SEQ ID NO:1724, are transfected into host cells as linearized plasmids at a ratio of 1:1 in the CHO-K1 host cell line using reagents such as Freestyle Max reagent. Fluorescence-activated cell sorting (FACS) coupled with single cell imaging can be used as a cloning method to obtain a production cell line.

[0357] A host cell transfected with an expression vector encoding an anti-tumor antibody of the present disclosure, or fragment thereof, can be cultured under appropriate conditions to allow expression of the polypeptide to occur. The polypeptides may be secreted and isolated from a mixture of cells and medium containing the polypeptides. Alternatively, the polypeptide may be retained in the cytoplasm or in a membrane fraction and the cells harvested, lysed, and the polypeptide isolated using a desired method.

[0358] In some embodiments, an anti-tumor antibody of the present disclosure can be produced by in vitro synthesis (see, e.g., Sutro Biopharma biochemical protein synthesis platform).

[0359] In some embodiments, provided herein is a method of generating variants of an anti-tumor antibody as disclosed herein. Thus, for example, a construct encoding a variant of a V_{H} CDR3 as described herein can be modified and the V_{H} region encoded by the modified construct can be tested for binding activity to EMT-6 cells and/or in vivo anti-tumor activity in the context of a V_{H} region as described herein, that is paired with a V_{L} region or variant region as described herein. Similarly, a construct encoding a variant of a V_{L} CDR3 as described herein can be modified and the V_{L} region encoded by the modified construct can be tested for binding to EMT-6 cells, or other tumor cells, and/or in vivo anti-tumor activity efficacy. Such an analysis can also be performed with other CDRs or framework regions and an antibody having the desired activity can then be selected.

### Anti-Tumor Antibody Conjugates/Co-Stimulatory Agents

[0360] In a further aspect, an anti-tumor antibody of the present invention may be conjugated or linked to therapeutic and/or imaging/detectable moieties. For example, the anti-tumor antibody may be conjugated to a detectable marker, a cytotoxic agent, an immunomodulating agent, an imaging agent, a therapeutic agent, or an oligonucleotide. Methods for conjugating or linking antibodies to a desired molecule are well known in the art. The moiety may be linked to the antibody covalently or by non-covalent linkages.

[0361] In some embodiments, the antibody is conjugated to cytotoxic moiety or other moiety that inhibits cell proliferation. In some embodiments, the antibody is conjugated to a cytotoxic agent including, but not limited to, e.g., ricin A chain, doxorubicin, daunorubicin, a maytansinoid, taxol, ethidium bromide, mitomycin, etoposide, tenoposide, vincristine, vinblastine, colchicine, dihydroxy anthracin dione, methotrexact, actinomycin, a diphtheria toxin, extotoxin A from Pseudomonas, Pseudomonas exotoxin40, abrin, abrin A chain, modeccin A chain, alpha sarcin, gelonin, mitogellin, restrictocin, cobran venom factor, a ribonuclease, engineered Shiga toxin, phenomycin, enomycin, curicin, crotin, calicheamicin, Saponaria officinalis inhibitor, glucocorticoid, auristatin, auromycin, yttrium, bismuth, combrestatin, duocarmycins, dolastatin, cc1065, or a cisplatin. In some embodiments, the antibody may be linked to an agent such as an enzyme inhibitor, a proliferation inhibitor, a lytic agent, a DNA or RNA synthesis inhibitors, a membrane permeability modifier, a DNA metabolite, a dichloroethylsulfide derivative, a protein production inhibitor, a ribosome inhibitor, or an inducer of apoptosis. In some embodiments, the antibody is conjugated to a drug such as a topoisomeriase inhibitor, e.g., a topoisomeraise I inhibitor.

[0362] In some embodiments, an anti-tumor antibody of the invention is joined to a molecule that facilitates transport of the antibody across a biological membrane, e.g., by enhancing penetration of the membrane, facilitating protein translocation across membranes. Thus, for example, the antibody may be linked to a cell penetration agent, such as a cell-penetrating peptide. Examples of cell penetrating peptides include TAT, penetratin, polyarginine molecules, Kunitz domain-derived peptides, e.g., angiopep-2, SynB, buforin, transportan, amphiphathic peptides and others. In some embodiments, the antibody may be conjugated with a cationic molecule such as a polyamine. In some embodiments, the antibody may be conjugated to an agent that facilitates transport across the blood brain barrier, e.g., transcytosis. Thus, for example, the antibody may be conjugated to an agent that binds to endothelial cell receptors that are internalized, e.g., transferrin receptor, insulin receptor, insulin-like growth factor receptor, or a low-density lipoprotein receptor, and the like. In some embodiments, the antibody may be conjugated to a toxin facilitating entry of the antibody into the cytoplasm, e.g., Shiga toxin.

[0363] In some embodiments, an anti-tumor antibody is conjugated or co-administered with a polypeptide immunomodulating agent, e.g., an adjuvant. Examples of immunomodulating agents include, but are not limited to, cytokines, growth factors, lymphotoxins, tumor necrosis factor (TNF), hematopoietic factors, interleukins (e.g., interleukin-1 (IL-1), IL-2, IL-3, IL-6, IL-10, IL-12, IL-15, an IL-15/IL-15Rα, e.g., sushi domain, complex, IL-18, and IL-21), colony stimulating factors (e.g., granulocyte-colony stimulating factor (G-CSF) and granulocyte macrophage-colony stimulating factor (GM-CSF), interferons (e.g., interferon-α, -β or -γ), erythropoietin and thrombopoietin, or a combination thereof. In some embodiments, the antibody is linked or co-administered with an adjuvant, such as a Toll-like receptor (TLR) agonist, a C-type lectin receptor (CLR) agonist, a retinoic acid-inducible gene I-like receptor (RLR) agonist, a saponin, a polysaccharide such as chitin, chitosan, β-glucan, an ISCOM, QS-21, a stimulator of interferon genes (STING) agonist, or another immunopotentiating agent.

[0364] In some embodiments, the antibody may be linked to a radionuclide, an iron-related compound, a dye, a fluorescent agent, or an imaging agent. In some embodiments, an antibody may be linked to agents, such as, but not limited to, metals; metal chelators; lanthanides; lanthanide chelators; radiometals; radiometal chelators; positron-emitting nuclei; microbubbles (for ultrasound); liposomes; molecules microencapsulated in liposomes or nanosphere; monocrystalline iron oxide nanocompounds; magnetic resonance imaging contrast agents; light absorbing, reflecting and/or scattering agents; colloidal particles; fluorophores, such as near-infrared fluorophores.

### Methods of Inducing an Immune Response

[0365] In a further aspect, provided herein are methods of inducing an immune response by administering a tumor-binding antibody as described herein to a subject that has a tumor that comprises an extracellular RNA-protein complex to which the tumor-binding antibody binds. In some embodiments, the tumor-binding antibody is an antibody set forth in Table 1 or Table 2, or a variant thereof as described above.

[0366] An immune response induced by administration of an antibody as described herein can be either an innate or adaptive immune response. In some embodiments, the antibody directly activates an immune response directly, e.g., via binding of the antibody to a target tumor cell and engagement with an Fc receptor on an effector cell such that the effector cell is activated. In some embodiments, the antibody indirectly activates an immune response by inducing immune responses that are initiated by antibody binding to the target cell and an effector cell with subsequent induction of downstream immune responses. In some embodiments, the antibody activates monocytes, myeloid cells, and/or NK cells, e.g., macrophages, neutrophils, dendritic cells, mast cells, basophils, eosinophile, and/or NK cells. In some embodiments, the antibody activates T lymphocytes and/or B cells.

### Treatment of Cancer

[0367] In a further aspect, a tumor-binding antibody as provided herein, e.g., an antibody set forth in Table 1 or a variant thereof as described above, can be used and a therapeutic agent to treat cancer. In some aspects, the disclosure additionally provides methods of identifying subjects who are candidates for treatment with an anti-tumor antibody having anti-tumor effects. Thus, in one embodiment, the invention provides a method of identifying a patient who has tumor cells that binds to an anti-tumor antibody of the present disclosure. In some embodiments, the tumor sample is from a primary tumor. In alternative embodiments, the tumor sample is a metastatic lesion. Binding of antibody to tumor cells through a binding interaction with an extracellular RNA-protein complex can be measured using any assay, such as immunohistochemistry or flow cytometry. In some embodiments, binding of antibody to at least 0.2%, 0.5%, or 1%, or at least 5% or 10%, or at least 20%, 30%, or 50%, of the tumor cells in a sample may be used as a selection criteria for determining a patient to be treated with an anti-tumor antibody as described herein. In other embodiments, analysis of components of the blood, e.g., circulating exosomes and/or extracellular RNA-protein complex, is used to identify a patient whose tumor cells are generating an extracellular RNA-protein complex.

[0368] Any number of cancers can be treated with an anti-tumor antibody of the present invention. In some embodiments, the cancer is a carcinoma or a sarcoma. In some embodiments, the cancer is a hematological cancer. In some embodiments, the cancer is breast cancer, prostate cancer, testicular cancer, renal cell cancer, bladder cancer, ovarian cancer, cervical cancer, endometrial cancer, lung cancer, colorectal cancer, anal cancer, pancreatic cancer, gastric cancer, esophageal cancer, hepatocellular cancer, head and neck cancer, a brain cancer, e.g., glioblastoma, melanoma, or a bone or soft tissue sarcoma. IN one embodiments, the cancer is acral melanoma. In some embodiments, the cancer is acute lymphoblastic leukemia, acute myeloid leukemia, adrenocortical carcinoma, astrocytoma, basal-cell carcinoma, bile duct cancer, bone tumor, brainstem glioma, cerebellar astrocytoma, cerebral astrocytoma, ependymoma, medulloblastoma, supratentorial primitive neuroectodermal tumors, visual pathway and hypothalamic glioma, bronchial adenomas, Burkitt's lymphoma, central nervous system lymphoma, cerebellar astrocytoma, chondrosarcoma, chronic lymphocytic leukemia, chronic myelogenous leukemia, chronic myeloproliferative disorders, colon cancer, cutaneous T-cell lymphoma, desmoplastic small round cell tumor, endometrial cancer, ependymoma, epitheliod hemangioendothelioma (EHE), esophageal cancer, Ewing's sarcoma, extracranial germ cell tumor, extragonadal germ cell tumor, extrahepatic bile duct cancer, a cancer of the eye, intraocular melanoma, retinoblastoma, gallbladder cancer, gastrointestinal carcinoid tumor, gastrointestinal stromal tumor (GIST), germ cell tumor, gestational trophoblastic tumor, gastric carcinoma, hairy cell leukemia, hepatocellular carcinoma, Hodgkin lymphoma, hypopharyngeal cancer, hypothalamic and visual pathway glioma, childhood, intraocular melanoma, islet cell carcinoma, Kaposi sarcoma, kidney cancer, laryngeal cancer, leukaemias, lip and oral cavity cancer, liposarcoma, liver cancer, non-small cell lung cancer, small-cell lung cancer, lymphomas, macroglobulinemia, male breast cancer, malignant fibrous histiocytoma of bone, medulloblastoma, Merkel cell cancer, mesothelioma, metastatic squamous neck cancer, mouth cancer, multiple endocrine neoplasia syndrome, multiple myeloma, mycosis fungoides, myelodysplastic syndromes, myelogenous leukemia, myeloid leukemia, adult acute, myeloproliferative disorders, chronic, myxoma, nasal cavity and paranasal sinus cancer, nasopharyngeal carcinoma, neuroblastoma, non-Hodgkin lymphoma, oligodendroglioma, oral cancer, oropharyngeal cancer, osteosarcoma, ovarian epithelial cancer, ovarian germ cell tumor, ovarian low malignant potential tumor, paranasal sinus and nasal cavity cancer, parathyroid cancer, penile cancer, pharyngeal cancer, pheochromocytoma, pineal astrocytoma, pineal germinoma, pineoblastoma, supratentorial primitive neuroectodermal tumors, pituitary adenoma. plasma cell neoplasia, pleuropulmonary blastoma, primary central nervous system lymphoma, rectal cancer, renal cell carcinoma, retinoblastoma, rhabdomyosarcoma, salivary gland cancer, Ewing sarcoma, Kaposi sarcoma, soft tissue sarcoma, uterine sarcoma, Sézary syndrome, non-melanoma skin cancer, melanoma, small intestine cancer, squamous cell carcinoma, squamous neck cancer, stomach cancer, cutaneous T-Cell lymphoma, throat cancer, thymoma, thyroid cancer, transitional cell cancer of the renal pelvis and ureter, trophoblastic tumor, gestational, urethral cancer, uterine cancer, vaginal cancer, vulvar cancer, Waldenström macroglobulinemia, or Wilms tumor.

[0369] In some embodiments, the cancer is lung cancer, e.g., non-small cell lung adenocarcinoma or squamous cell carcinoma; breast cancer, e.g., Triple⁻, ER/PR⁺Her2⁻, ER/PR⁻Her2⁺, or Triple⁻; colorectal cancer, e.g., adenocarcinoma, mucinous adenocarcinoma, or papillary adenocarcinoma; esophageal cancer; stomach cancer; kidney cancer, e.g., kidney clear cell cancer; ovarian cancer, e.g., ovarian endometrioid carcinoma, ovarian mucinous cystadenocarcinoma, or ovarian serous cystadenomcarcinoma; melanoma, e.g., acral melanoma, cutaneous melanoma, or mucosal melanoma; uterine or cervical cancer; liver cancer, e.g., hepatocellular carcinoma or bile duct carcinoma; bladder cancer, e.g., transitional or urothelial bladder cancer; or testicular cancer.

[0370] In one aspect, methods of the disclosure comprise administering an anti-tumor antibody, e.g., an antibody set forth in Table 1 or a variant thereof as described above, as a pharmaceutical composition to a cancer patient in a therapeutically effective amount using a dosing regimen suitable for treatment of the cancer. The composition can be formulated for use in a variety of drug delivery systems. One or more physiologically acceptable excipients or carriers can also be included in the compositions for proper formulation. Suitable formulations for use in the present invention are found, e.g., in Remington: The Science and Practice of Pharmacy, 21st Edition, Philadelphia, Pa. Lippincott Williams & Wilkins, 2005.

[0371] The anti-tumor antibody is provided in a solution suitable for administration to the patient, such as a sterile isotonic aqueous solution for injection. The antibody is dissolved or suspended at a suitable concentration in an acceptable carrier. In some embodiments the carrier is aqueous, e.g., water, saline, phosphate buffered saline, and the like. The compositions may contain auxiliary pharmaceutical substances as required to approximate physiological conditions, such as pH adjusting and buffering agents, tonicity adjusting agents, and the like.

[0372] The pharmaceutical compositions are administered to a patient in an amount sufficient to cure or at least partially arrest the disease or symptoms of the disease and its complications. An amount adequate to accomplish this is defined as a “therapeutically effective dose.” A therapeutically effective dose is determined by monitoring a patient's response to therapy. Typical benchmarks indicative of a therapeutically effective dose include the amelioration of symptoms of the disease in the patient. Amounts effective for this use will depend upon the severity of the disease and the general state of the patient's health, including other factors such as age, weight, gender, administration route, etc. Single or multiple administrations of the antibody may be administered depending on the dosage and frequency as required and tolerated by the patient. In any event, the methods provide a sufficient quantity of anti-tumor antibody to effectively treat the patient.

[0373] An anti-tumor antibody can be administered by any suitable means, including, for example, parenteral, intrapulmonary, and intranasal, administration, as well as local administration, such as intratumor administration. Parenteral infusions include intramuscular, intravenous, intraarterial, intraperitoneal, or subcutaneous administration. In some embodiments, the antibody may be administered by insufflation. In an illustrative embodiment, the antibody may be stored at 10 mg/ml in sterile isotonic aqueous saline solution for injection at 4° C. and is diluted in either 100 ml or 200 ml 0.9% sodium chloride for injection prior to administration to the patient. In some embodiments, the antibody is administered by intravenous infusion over the course of 1 hour at a dose of between 0.01 and 25 mg/kg. In other embodiments, the antibody is administered by intravenous infusion over a period of between 15 minutes and 2 hours. In still other embodiments, the administration procedure is via sub-cutaneous bolus injection.

[0374] The dose of antibody is chosen in order to provide effective therapy for the patient and is in the range of less than 0.01 mg/kg body weight to about 25 mg/kg body weight or in the range 1 mg-2 g per patient. Preferably the dose is in the range 0.1-10 mg/kg or approximately 50 mg-1000 mg/patient. The dose may be repeated at an appropriate frequency which may be in the range once per day to once every three months, or every six months, depending on the pharmacokinetics of the antibody (e.g., half-life of the antibody in the circulation) and the pharmacodynamic response (e.g., the duration of the therapeutic effect of the antibody). In some embodiments, the in vivo half-life of between about 7 and about 25 days and antibody dosing is repeated between once per week and once every 3 months or once every 6 months. In other embodiments, the antibody is administered approximately once per month.

[0375] In an illustrative embodiment, the antibody may be stored at 10 mg/ml or 20 mg/ml in a sterile isotonic aqueous solution. The solution can comprise agents such as buffering agents and stabilizing agents. For example, in some embodiments, a buffering agent such as histidine is included to maintain a formulation pH of about 5.5. Additional reagents such as sucrose or alternatives can be added to prevent aggregation and fragmentation in solution and during freezing and thawing. Agents such as polysorbate 80 or an alternative can be included to lower surface tension and stabilizes the antibody against agitation-induced denaturation and air-liquid and ice-liquid surface denaturation. In some embodiments, the solution for injection is stored at 4° C. and is diluted in either 100 ml or 200 ml 0.9% sodium chloride for injection prior to administration to the patient.

[0376] In some embodiments, antibody for IV administration, e.g., an antibody having a heavy chain sequence of SEQ ID NO:1723 and a light chain sequence of SEQ ID NO:1724, is formulated at a target concentration of 20 mg/mL in 20 mM histidine buffer, 8% (w/v) sucrose and 0.02% (w/v) polysorbate 80, pH 5.5.

[0377] An anti-tumor antibody of may be administered with one or more additional therapeutic agents, e.g., radiation therapy, chemotherapeutic agents and/or immunotherapeutic agents.

[0378] In some embodiments, an anti-tumor antibody can be administered in conjunction with an agent that targets an immune checkpoint antigen. In one aspect, the agent is a biologic therapeutic or a small molecule. In another aspect, the agent is a monoclonal antibody, a humanized antibody, a human antibody, a fusion protein or a combination thereof. In certain embodiments, the agents inhibit, e.g., by blocking ligand binding to receptor, a checkpoint antigen that may be PD1, PDL1, CTLA-4, ICOS, PDL2, IDO1, IDO2, B7-H3, B7-H4, BTLA, HVEM, TIM3, GALS, GITR, HAVCR2, LAG3, KIR, LAIR1, LIGHT, MARCO, OX-40, SLAM, 2B4, CD2, CD27, CD28, CD30, CD40, CD70, CD80, CD86, CD137 (4-1BB), CD160, CD39, VISTA, TIGIT, a SIGLEC, CGEN-15049, 2B4, CHK1, CHK2, A2aR, B-7 family ligands or their receptors, or a combination thereof. In some embodiments, the agent targets PD-1, e.g., an antibody that blocks PD-L1 binding to PD-1 or otherwise inhibits PD-1. In some embodiments, the agent targets CTLA-4. In some embodiments, the agent targets LAG3. In some embodiments, the agent targets TIM3. In some embodiments, the agents target ICOS.

[0379] In some embodiments, an anti-tumor antibody can be administered in conjunction with a therapeutic antibody, such as an antibody that targets a tumor cell antigen. Examples of therapeutic antibodies include as rituximab, trastuzumab, tositumomab, ibritumomab, alemtuzumab, atezolizumab, avelumab, durvalumab, pidilizumab, AMP-224, AMP-514, PDR001, cemiplimab, BMS-936559, CK-301, epratuzumab, bevacizumab, elotuzumab, necitumumab, blinatumomab, brentuximab, cetuximab, daratumumab, denosumab, dinutuximab, gemtuzumab ibritumomab ipilimumab, nivolumab, obinutuzumab, ofatumumab, ado-trastuzumab, panitumumab, pembrolizumab, pertuzumab, ramucirumab, and ranibizumab.

[0380] In some embodiments, an anti-tumor antibody is administered with a chemotherapeutic agent. Examples of cancer chemotherapeutic agents include alkylating agents such as thiotepa and cyclophosphamide; alkyl sulfonates such as busulfan, improsulfan and piposulfan; aziridines such as benzodopa, carboquone, meturedopa, and uredopa; ethylenimines and methylamelamines including altretamine, triethylenemelamine, trietylenephosphoramide, triethylenethiophosphaoramide and trimethylolomelamine; nitrogen mustards such as chlorambucil, chlornaphazine, cholophosphamide, estramustine, ifosfamide, mechlorethamine, mechlorethamine oxide hydrochloride, melphalan, novembichin, phenesterine, prednimustine, trofosfamide, uracil mustard; nitrosureas such as carmustine, chlorozotocin, fotemustine, lomustine, nimustine, ranimustine; antibiotics such as aclacinomysins, actinomycin, authramycin, azaserine, bleomycins, cactinomycin, calicheamicin, carabicin, caminomycin, carzinophilin, chromomycins, dactinomycin, daunorubicin, detorubicin, 6-diazo-5-oxo-L-norleucine, doxorubicin, epirubicin, esorubicin, idarubicin, marcellomycin, mitomycins, mycophenolic acid, nogalamycin, olivomycins, peplomycin, potfiromycin, puromycin, quelamycin, rodorubicin, streptonigrin, streptozocin, tubercidin, ubenimex, zinostatin, zorubicin; antimetabolites such as methotrexate and 5-fluorouracil; folic acid analogues such as denopterin, methotrexate, pteropterin, trimetrexate; purine analogs such as fludarabine, 6-mercaptopurine, thiamiprine, thioguanine; pyrimidine analogs such as ancitabine, azacitidine, 6-azauridine, carmofur, cytarabine, dideoxyuridine, doxifluridine, enocitabine, floxuridine, androgens such as calusterone, dromostanolone propionate, epitiostanol, mepitiostane, testolactone; anti-adrenals such as aminoglutethimide, mitotane, trilostane; folic acid replenisher such as frolinic acid; aceglatone; aldophosphamide glycoside; aminolevulinic acid; amsacrine; bestrabucil; bisantrene; edatraxate; defofamine; demecolcine; diaziquone; elformithine; elliptinium acetate; etoglucid; gallium nitrate; hydroxyurea; lentinan; lonidamine; mitoguazone; mitoxantrone; mopidamol; nitracrine; pentostatin; phenamet; pirarubicin; podophyllinic acid; 2-ethylhydrazide; procarbazine; razoxane; sizofiran; spirogermanium; tenuazonic acid; triaziquone; 2, 2′,2″-trichlorotriethylamine; urethan; vindesine; dacarbazine; mannomustine; mitobronitol; mitolactol; pipobroman; gacytosine; arabinoside; cyclophosphamide; thiotepa; taxoids, e.g. paclitaxel and doxetaxel; chlorambucil; gemcitabine; 6-thioguanine; mercaptopurine; methotrexate; platinum analogs such as cisplatin and carboplatin; vinblastine; docetaxel, platinum; etoposide (VP-16); ifosfamide; mitomycin C; mitoxantrone; vincristine; vinorelbine; navelbine; novantrone; teniposide; daunomycin; aminopterin; xeloda; ibandronate; CPT-1 1; topoisomerase inhibitor RFS 2000; difluoromethylomithine (DMFO); retinoic acid derivatives such as bexarotene, alitretinoin; denileukin diftitox; esperamicins; capecitabine; and pharmaceutically acceptable salts, acids or derivatives of any of the above. Also included in this definition are anti-hormonal agents that act to regulate or inhibit hormone action on tumors such as anti-estrogens including for example tamoxifen, raloxifene, mifepristone, aromatase inhibiting 4(5)-imidazoles, 4-hydroxytamoxifen, trioxifene, keoxifene, LY 1 17018, onapristone, and toremifene (Fareston); and anti-androgens such as flutamide, nilutamide, bicalutamide, leuprolide, and goserelin; and pharmaceutically acceptable salts, acids or derivatives of any of the above. Further cancer therapeutic agents include sorafenib and other protein kinase inhibitors such as afatinib, axitinib, crizotinib, dasatinib, erlotinib, fostamatinib, gefitinib, imatinib, lapatinib, lenvatinib, mubritinib, nilotinib, pazopanib, pegaptanib, ruxolitinib, vandetanib, vemurafenib, and sunitinib; sirolimus (rapamycin), everolimus and other mTOR inhibitors. Examples of additional chemotherapeutic agents include topoisomerase I inhibitors (e.g., irinotecan, topotecan, camptothecin and analogs or metabolites thereof, and doxorubicin); topoisomerase II inhibitors (e.g., etoposide, teniposide, and daunorubicin); alkylating agents (e.g., melphalan, chlorambucil, busulfan, thiotepa, ifosfamide, carmustine, lomustine, semustine, streptozocin, decarbazine, methotrexate, mitomycin C, and cyclophosphamide); DNA intercalators (e.g., cisplatin, oxaliplatin, and carboplatin); DNA intercalators and free radical generators such as bleomycin; and nucleoside mimetics (e.g., 5-fluorouracil, capecitibine, gemcitabine, fludarabine, cytarabine, mercaptopurine, thioguanine, pentostatin, and hydroxyurea). Illustrative chemotherapeutic agents additionally include paclitaxel, docetaxel, and related analogs; vincristine, vinblastin, and related analogs; thalidomide, lenalidomide, and related analogs (e.g., CC-5013 and CC-4047); protein tyrosine kinase inhibitors (e.g., imatinib mesylate and gefitinib); proteasome inhibitors (e.g., bortezomib); NF-κB inhibitors, including inhibitors of IκB kinasel and other inhibitors of proteins or enzymes known to be upregulated, over-expressed or activated in cancers, the inhibition of which down regulates cell replication. Additional agents include asparaginase and a Bacillus Calmete-Guérin preparation.

[0381] In some embodiments, an anti-tumor antibody as described herein is administered after, or at the same time, as a therapeutic agent, e.g., a chemotherapeutic agent, such as doxorubicin, that induces stress granules (“SG-inducing agent”). Increasing the amount of stress granules in cancer cells can promote targeting the tumor cells by the anti-tumor antibody. Other exemplary therapeutic agents that can induce stress granules include pyrimidine analogs (e.g., 5-FU, under trade names of Adrucil®, Carac®, Efudex®, Efudix®); protease inhibitors (e.g., Bortezomib, under the trade name of Velcade®); kinase inhibitors (e.g, Sorafenib and Imatinib, under the trade names of Nexavar® and Gleevec®, respectively); Arsenic compounds (e.g., Arsenic trioxide, under the trade name of Trisenox®); Platinum-based compounds that induce DNA damage (e.g., Cisplatin and Oxaliplatin®, under the trade names of Platinol® and Eloxatin®, respectively); agents that disrupt microtubules (e.g., Vinblastin, under the trade name of Velban® or alkabban-AQ®; vincristin, under the trade name of Vincasar®, Marqibo®, or Oncovin®; Vinorelbin, under the trade name of Navelbin®); topoisomerase II inhibitor (e.g., Etoposide, under the trade name of Etopophos, Toposar®, VePesid®); and agents that induce DNA damage, e.g., irradiation. A number of exemplary therapeutic agents that can induce stress granules formation are disclosed in Mahboubi et al., Biochimica et Biophysica Acta 1863 (2017) 884-895.

[0382] Various combinations with the anti-tumor antibody and the SG-inducing agent (or a combination of such agents) described herein may be employed to treat a cancer patient. By “combination therapy” or “in combination with”, it is not intended to imply that the therapeutic agents must be administered at the same time and/or formulated for delivery together, although these methods of delivery are within the scope described herein. The anti-tumor antibody and the SG-inducing agent can be administered following the same or different dosing regimen. In some embodiments, the anti-tumor antibody and the SG-inducing agent is administered sequentially in any order during the entire or portions of the treatment period. In some embodiments, the anti-tumor antibody and the SG-inducing agent is administered simultaneously or approximately simultaneously (e.g., within about 1, 5, 10, 15, 20, or 30 minutes of each other). In still other embodiments, the SG-inducing agent may be administered 1, 2, 3, 4, 5, 6, 7, 8, 9, 10, or more days before administration of the anti-tumor antibody. In some embodiments, the SG-inducing agent is administered from 1 to 4 weeks, or longer, before the anti-tumor antibody is administered.

[0383] An anti-tumor antibody may also be administered to a cancer patient in conjunction with a cell based therapy, such as natural killer (NK) cell therapy or a cancer vaccine. In some instances, a cancer vaccine is a peptide-based vaccine, a nucleic acid based vaccine, a cell-based vaccine, a virus-based or viral fragment based vaccine or an antigen presenting cell (APC) based vaccine (e.g. dendritic cell based vaccine). Cancer vaccines include Gardasil®, Cervarix®, sipuleucel-T (Provenge®), NeuVax™, HER-2 ICD peptide-based vaccine, HER-2/neu peptide vaccine, AdHER2/neu dendritic cell vaccine, HER-2 pulsed DC1 vaccine, Ad-sig-hMUC-1/ecdCD40L fusion protein vaccine, MVX-ONCO-1, hTERT/survivin/CMV multipeptide vaccine, E39, J65, P10s-PADRE, rV-CEA-Tricom, GVAX®, Lucanix®, HER2 VRP, AVX901, ONT-10, ISA1O1, ADXSl 1-001, VGX-3100, INO-9012, GSK1437173A, BPX-501, AGS-003, IDC-G305, HyperAcute®-Renal (HAR) immunotherapy, Prevenarl3, MAGER-3.A1, NA17.A2, DCVax-Direct, latent membrane protein-2 (LMP2)-loaded dendritic cell vaccine (NCT02115126), HS410-101 (NCT02010203, Heat Biologies), EAU RF 2010-01 (NCT01435356, GSK), 140036 (NCT02015104, Rutgers Cancer Institute of New Jersey), 130016 (NCTO 1730118, National Cancer Institute), MVX-201101 (NCT02193503, Maxivax SA), ITL-007-ATCR-MBC (NCT01741038, Immunovative Therapies, Limited), CDR0000644921 (NCT00923143, Abramson cancer center of the University of Pennsylvania), SuMo-Sec-01 (NCT00108875, Julius Maximilians Universitaet Hospital), or MCC-15651 (NCT01176474, Medarex, Inc, BMS).

[0384] In some embodiments, an anti-tumor antibody of the present invention may be administered with an agent, e.g., a corticosteroid, that mitigates side-effects resulting from stimulation of the immune system.

[0385] In the context of the present invention a therapeutic agent that is administered in conjunction with an anti-tumor antibody of the present invention can be administered prior to administrations of the anti-tumor antibody or after administration of the anti-tumor antibody. In some embodiments, an anti-tumor antibody may be administered at the same time as the additional therapeutic agent.

[0386] The following examples are offered for illustrative purposes, and are not intended to limit the invention. Those of skill in the art will readily recognize a variety of non-critical parameters that can be changed or modified to yield essentially the same results.

### EXAMPLES

### Example 1. Identification of Antibody Variants Having Anti-Tumor Effects

[0387] An initial lead antibody sequence, designated as AIP-192482, was obtained by sequencing a plasmablast from a patient that had non-small cell lung cancer was identified in an in vivo tumor model screen in combination with anti-PD1 antibody therapy.

[0388] An EMT6 ectopic tumor model was employed in the initial screen. Balb/c mice were injected subcutaneously along the right flank with 10⁶ EMT6 cells. Anti-tumor activity of an initial antibody from the lineage was further evaluated in the EMT6 syngeneic ectopic breast cancer model in Balb/c mice. Mice were randomized into treatment groups based on tumor volume (TV) once tumors reached an average of 75-120 mm³. Treatment with test antibodies and/or checkpoint inhibitor therapy started on the day of randomization. Unless otherwise stated, test antibodies were administered twice weekly for 3.5 weeks (TW×3.5w) by intraperitoneal (i.p.) injection. Pools of four antibodies were tested at doses of 5 mg/kg (mpk) each (20 mg/kg total antibody) by i.p. injection twice weekly for 3.5 weeks (7 doses). Animals were treated in combination with anti-mouse PD1 antibody dosed i.p. at 10 mpk, twice weekly for two weeks. The initial lead antibody was also tested alone (outside of pool) at 20 mpk in combination with anti-PD1. The antibody pool containing the lead antibody showed anti-tumor activity (FIG. 1).

[0389] Variants of the initial lead antibody were generated and tested in the EMT6 tumor model (subcutaneous injection of tumor cells). Variants were tested as a monotherapy and administered at doses at 10 mpk twice weekly for 3.5 weeks as above. Variants having anti-tumor activity were identified (FIGS. 2A and 2B).

[0390] Survival probability data for the initial lead antibody and variants are shown in FIGS. 3A and 3B. P-values were calculated by log-rank test. The initial lead antibody showed marked effects on survival at doses of both 5 mpk and 10 mpk. Variants AIP-106042 and AIP-100196 (FIG. 3A) showed pronounced effects, as did variants AIP-122563, AIP-165430, AIP-157397, and AIP-171142 (FIG. 3B). Other variants also exhibited increased survival probability, although at lower levels (FIGS. 3A and 3B). For example, antibody AIP-148327 increased survival probability at day 40 compared to controls (FIG. 3B).

[0391] The effects of administration of variants on tumor volume are shown in FIGS. 4A and 4B. Data are expressed as Normalized Area Above the Curve (NAAC). A NAAC value is computed for each individual antibody based on its tumor volume curves. A NAAC value falls between 0 and 1. The closer the value is to 1, the lower the tumor volume is over time, i.e., the more efficacious is the treatment. Variants were identified that had pronounced effects on tumor volume e.g., AIP-106042 and AIP-100196 (FIG. 4A) and AIP-171142, AIP-157397, AIP-165430, and AIP-122563 (FIG. 4B). Treatment with other antibody variants also led to at least some reduction in tumor volume.

[0392] Variants of antibodies identified in the screen of first-generation variants as having anti-tumor activity were also generated. These variants were also evaluated as a monotherapy in the EMT6 tumor model as described above. Variants were administered the doses indicated in FIGS. 5A-5D twice weeks for 3.5 weeks. Variants having anti-tumor effects were identified (FIGS. 5A-5D).

[0393] Survival data for antibodies treated with the second-generation variants are shown in FIGS. 6A and 6B. P-values were calculated by log-rank test. Variants were identified that showed pronounced increased in survival probability (e.g., AIP-155066, AIP-166120, AIP-142079, AIP-104188 (FIG. 6A) and AIP-158623, AIP-133645, AIP-136538, AIP-187893, and AIP-160470 (FIG. 6B).

[0394] The effects of administration of second-generation variants on tumor volume in the EMT6 tumor model are shown in FIGS. 7A and 7B. Variants AIP-155066, AIP-166120, AIP-142079, and AIP-104188 exhibited NAAC values significantly above control when administered in an amount of 5 mpk with most also showing NAAC values significantly above control at 2.5 mpk. Variants AIP-158623, AIP-136538, AIP-133645, and AIP-187893 exhibited pronounced NAAC values for all concentrations tested; with some variants showing NAAC values well-above control.

[0395] Treatment with two of the variants (AIP-133645 and AIP-160470) identified in the preceding analysis was evaluated when administered in combination with anti-PD1 antibody. The EMT6 tumor model was again used. The initial lead antibody was administered at doses of 5 and 10 mpk. Variants were dosed at 2.5 and 5 mpk. The anti-PD1 antibody was administered at 10 mpk. The study design is shown in FIG. 8. Antibodies were administered by i.p. injection at the indicated doses and frequencies. Survival analysis of the initial lead antibody and two variants when administered as a monotherapy is shown in FIG. 9. Both variants AIP-160470 and AIP-133645 were able to improve survival relative to the initial lead antibody Effects on tumor growth, survival probability, and tumor volume for the lead antibody and two variants when administered as monotherapies are shown in FIG. 10, FIG. 11, and FIG. 12, respectively. Effects on tumor growth, survival probability and tumor volume when the antibodies were administered in combination with the anti-PD1 antibody are shown in FIG. 13, FIG. 14, and FIG. 15, respectively.

[0396] Anti-tumor effects of the initial lead antibody and variants AIP-160470 and AIP-133645 were also evaluated as monotherapies in a CT-26 colorectal cancer ectopic syngeneic mouse tumor model. Animals were injected subcutaneously with 10⁶ CT26 tumor cells along the right flank. Antibodies were administered at a dose of 20 mpk by i.p. injection 2×/wk for 3.5 weeks. Effects on tumor growth, survival probability, and tumor volume are shown in FIG. 16, FIG. 17, and FIG. 18, respectively. All three antibodies exhibited pronounced therapeutic effects in decreasing tumor growth, improving survival probability, decreasing tumor volume.

### Example 2. Histological Analysis of Antibody Binding

[0397] Binding to mouse and human tumor cells and adjacent tissues was also analyzed. The initial lead antibody and a subset of variants were tested for binding to human estrogen receptor (ER)-positive breast carcinoma (Stage II) and adjacent breast tissue. Frozen samples were cryosectioned, mounted on slides and lightly fixed with 4% PFA. Slides were incubated using 10, 1 and 0.3 μg/ml primary antibody and IgG control (no signal detected), followed by an anti-mouse secondary antibody conjugated to Cy5, counterstained with Hoechst, and cover-slipped in an aqueous mounting medium. Adjacent slides were stained with hematoxylin and eosin (H&E). FIG. 19 compares binding of the initial lead antibody to tumor and TAT to that of variants AIP-157397 and AIP-165430. Variant AIP-157397 exhibited a pronounced increase in signal for binding to tumor. Signal for binding to TAT also increased compared to the initial lead, but binding could be titrated such that no signal was observed in TAT. Variant AIP-165430 exhibited enhanced binding to tumor compared to the lead with minimal increased in binding to TAT. Isotype controls showed no signal (data no shown).

[0398] Binding of variants AIP-106042 and AIP-100196 to human ER-positive breast cancer tissue and TAT was also evaluated using slides prepared as described and stained using 30, 10 and 3 μg/ml primary antibody and IgG control. Adjacent sections were stained using H&E. Both variants AIP-106042 and AIP-100196 bound to tumor tissue, but at decreased levels when compared to the lead (FIGS. 20 and 21). Little to no binding to TAT was observed even at the highest concentrations tested (data not shown).

[0399] Binding of variants AIP-160470, AIP-133645, AIP-158623, AIP-155066, AIP-136538, AIP-166120, AIP-187893, AIP-142079, AIP-184490, and AIP-104188 was also evaluated for ER-positive breast tumor tissue and TAT in comparison to binding exhibited by the initial lead antibody. ER-positive breast tumor and TAT sections were stained with H&E and immunostained with the lead antibody, variant, or isotype control (IgG) at 1, 3, and 10 μg/ml. Immunoreactivities were assessed by fluorescent microscopy, and images across concentrations were captured. Positive immunoreactivity (i.e., signal above the IgG control) was detected for the lead and all of the variants (AIP-160470, AIP-133645, AIP-158623, AIP-155066, AIP-136538, AIP-166120, AIP-187893, AIP-142079, AIP-184490, and AIP-104188) with the exception of AIP-136538 (FIG. 22). Images were matched for similar fluorescence intensities in the ER-positive breast cancer cores, regardless of antibody concentration. With the exceptions of AIP-136538 and AIP-104188, all variants tested demonstrated fluorescent intensities within breast tumor similar to that observed with the initial lead antibody, but at 3 to 10-fold lower primary antibody concentrations. Selectivity of tumor labeling vs. TAT binding was also assessed. The ratio of tumor to adjacent tissue signal was markedly enhanced vs. lead with a subset of variants including AIP-160470 and AIP-133645.

[0400] Antibody binding to EMT-6 tumors was also evaluated. Tumor samples were harvested from animals approximately 7 days post-inoculation of 10⁶ EMT-6 cells. EMT-6 binding activity was evaluated for variants AIP-157397, AIP-165430, AIP-160470, AIP-133645, AIP-158623, AIP-155066, AIP-136538, AIP-166120, AIP-187893, AIP-142079, AIP-184490, and AIP-104188 (data not shown). The background immunoreactivity was slightly higher in mouse tissue likely due to interactions with endogenous Fc receptors. While all variants exhibited binding to EMT-6 tumor cells, differential signal intensities were apparent between variants.

[0401] The initial lead antibody (FIG. 23A) and variants AIP-133645 (FIG. 23B) and AIP-160470 (FIG. 23C) were also evaluated for binding to tumor arising in mice inoculated with either human cancer cell lines (xenografts) or mouse cancer cell lines (syngeneic). Frozen tumors were cryosectioned onto slides. Antibodies and isotype control (IgG) were conjugated to AF647, and slides were incubated with the conjugates then counterstained with Hoechst. An adjacent section was also stained using H&E. Tumor sections stained using the variant antibodies showed enhanced signal compared to the lead for all tumors, including tumors arising from human lung A549 cells, human pancreas BXPC3 cells, human colon cancer Colo-205 cells, or human prostate cancer PC3 cells, and tumors arising from mouse colon, breast, lung, or kidney cancer cell lines.

### Example 3. Combination Therapy—Histological Analysis

[0402] The initial lead antibody was evaluated in vivo in the EMT-6 tumor model as a monotherapy and in combination with an anti-PD-1 antibody using a dosing schedule as described in Example 1. EMT-6 tumors from PBS-, anti-PD1-, lead antibody-, or combination therapy-treated cohorts were harvested at two and three weeks post-inoculation and evaluated histologically. Tumor sections were stained with H&E and Masson's trichrome (Trichrome). Immune cell phenotypes and activation state were assessed in tumor sections by immunofluorescence for CD4 (CD4+ Tcells), CD8 (CD8+ T cells), CD335 (NK cells), CD68 (macrophages) and iNOS (inducible nitric oxide synthase). Immune cell infiltration was elevated in tumors following treatment with the checkpoint inhibitor at both two (data not shown) and three weeks (FIG. 24) post-inoculation. Further, robust infiltration was observed at both two (data not shown) and three weeks (FIG. 24) in tumors from mice treated with the lead antibody or the combination of lead antibody and checkpoint inhibitor. Increased iNOS immunoreactivity indicated an active pro-inflammatory response in tumors from the lead and combination therapy-treated cohorts.

### Example 4. Ex Vivo Binding Assay Correlates with In Vivo Anti-Tumor Activity

[0403] The initial lead antibody and variant antibodies were analyzed in an ex vivo binding assay to determine correlation with in vivo anti-tumor activity. A schematic of the ex vivo assay is shown in FIG. 25. Mice were injected with tumor cells and the tumor allowed to grow to a size of about 500-600 mm³. Tumors were harvested, digested, and antibody binding to the surface of live tumor cells analyzed by flow cytometry. Binding was correlated with NAAC values representing tumor volume following in vivo treatment with antibody as described in Example 1. The results showed that binding of antibodies to the ex vivo EMT6 cells largely correlated with in vivo outcome (FIG. 26 and FIG. 27). Ex vivo flow analysis thus provides a screening assay that largely correlates with in vivo function that can be used to identify antibodies that are likely to elicit anti-tumor effects.

### Example 5. Analysis of Binding of Antibody to Target

[0404] To determine the target on tumor cells to which AIP-192482 binds, immunoprecipitation (IP) was performed with whole cell extracts. A549 cells were incubated overnight in methionine- and cysteine-free media supplemented with ³⁵S-labeled methionine and cysteine (37° C., 5% CO₂). Cells were lysed in radio-immunoprecipitation assay (RIPA) buffer (25 mM Tris.HCl pH 7.6, 150 mM NaCl, 1% NP-40, 1% sodium deoxycholate, 0.1% SDS) followed by 5 washes with buffer (1×phosphate buffer saline supplemented with 450 mM NaCl, 1 mM EDTA, 1% NP-40, 5% glycerol). IP reactions using AIP-192482 or control antibody were performed overnight using antibodies cross-linked to Dynabeads™ M-280 Tosyl activated paramagnetic beads. Beads were then collected on magnets and washed in 450 mM NaCl-containing buffer and eluted with 50 mM Tris, pH 8.0, 1 mM EDTA, and 1% sodium deoxycholate. Radiolabelled antigen bound to antibodies was eluted into 2×reducing SDS-PAGE sample buffer and resolved on 4-20% denaturing SDS-PAGE gels. Resolved proteins were visualized by phosphorimaging autoradiography. For analysis by mass spectrometry (MS), lysates were prepared using A549 cells that had not been metabolically labeled and IP reactions scaled up proportionally. Eluates were then evaluated by nanoLC-MS/MS analysis (performed by Alphalyse and MS Bioworks).

[0405] SDS-PAGE analysis (FIG. 28) identified a large number of unique proteins, ranging in size from 15.8 to 152.8 kDa. Numerous RNA-binding proteins were among the proteins identified by MS analysis. A large number of these identified proteins have been shown to be present in stress granules, see Markmiller et al., Cell, 172, 590-604, Jan. 25, 2018; and Youn et al., Molecular Cell, 69, 517-532 (2018) and Jain et al., Cell 164, 487-498 Jan. 28, 2016. Table 3 lists exemplary proteins identified in the immunoprecipitation complex pulled down by AIP-192482. These identified proteins are categorized based on whether they are also known to be in stress granules according to analyses that have been published previously: i) the biochemical isolation analysis on US-02 cells as described in Jain et al. (2016), ii) the APEX (proximity labeling) analysis performed on HEK293 cells as described in Markmiller et al. (2018), iii) the APEX (proximity labeling) analysis performed on neural progenitor cells as described in Markmiller et al. (2018), and iv) BioID (promixity lableing) analysis on HEK293 cells as described in Youn et al. (2018). Group 1 proteins (12 proteins) are among the list of proteins (20 proteins) that have been previously detected in stress granules by all four published analyses. Group 2 proteins (12 proteins) are among those list of proteins (38 proteins) that have been previously detected in stress granules by three of the four published analyses. Group 3 proteins (20 proteins) are among the list of proteins that have been previously detected in stress granules by two of the four published analyses. Group 4 proteins (63 proteins) are among the list of proteins (139) that have been previously detected in stress granules by Jain et al.

TABLE 3
Exemplary proteins in the immunoprecipitation
complex identified by MS

| Group 1 | Group 2 | Group 3 | Group 4 |
|---|---|---|---|
| TOTAL = | TOTAL = | TOTAL = | TOTAL = |
| 12/20 (60%) | 12/38 (32%) | 20/61 (33%) | 63/139 (45%) |
| ATXN2 | DHX36 | CASC3 | ACIN1 |
| FAM120A | ELAVL1 | CELF1 | ADAR |
| FUBP3 | FMR1 | DDX6 | ATXN2 |
| FXR1 | FXR2 | EDC4 | BAG2 |
| IGF2BP1 | HNRNPA1 | FUS | DDX17 |
| IGF2BP2 | HNRNPAB | GRSF1 | DDX21 |
| IGF2BP3 | PABPC1 | HNRNPA3 | DDX5 |
| PABPC4 | PCBP2 | HNRNPDL | DHX15 |
| STAU2 | PRRC2C | HNRNPH1 | DHX30 |
| SYNCRIP | PUM1 | HNRNPUL1 | DHX9 |
| UPF1 | RBMX | MOV10 | EDC4 |
| YBX3 | ZC3HAV1 | PTBP1 | EFTUD2 |
| | | PTBP3 | EIF4A3 |
| | | RBM4 | ELAVL1 |
| | | SND1 | FAM120A |
| | | SRSF9 | FBL |
| | | TNRC6A | FTSJ3 |
| | | TRIM25 | FUBP3 |
| | | TRIM56 | FUS |
| | | YBX1 | FXR1 |
| | | | HNRNPA0 |
| | | | HNRNPA1 |
| | | | HNRNPA3 |
| | | | HNRNPC |
| | | | HNRNPD |
| | | | HNRNPH1 |
| | | | HNRNPH3 |
| | | | HNRNPL |
| | | | HNRNPR |
| | | | HNRNPUL1 |
| | | | IGF2BP1 |
| | | | IGF2BP2 |
| | | | IGF2BP3 |
| | | | ILF2 |
| | | | ILF3 |
| | | | MATR3 |
| | | | MOV10 |
| | | | NOP56 |
| | | | PABPC1 |
| | | | PABPC4 |
| | | | PCBP2 |
| | | | PLEC |
| | | | PRPF8 |
| | | | PTBP1 |
| | | | RALY |
| | | | RBM14 |
| | | | RBMX |
| | | | RPL14 |
| | | | RPL4 |
| | | | RPS8 |
| | | | RRBP1 |
| | | | SF3B3 |
| | | | SNRNP200 |
| | | | SRRM2 |
| | | | SRSF10 |
| | | | STAU2 |
| | | | SYNCRIP |
| | | | TARDBP |
| | | | TRIM25 |
| | | | TRIM56 |
| | | | UPF1 |
| | | | YBX3 |
| | | | ZC3H7A |

[0406] As shown in Table 3 above, there was a significant overlap between the list of proteins identified in the immunoprecipitations using AIP-192482 and those known to be present in stress granules according to published literature. Further, contrary to the prevailing view that so little PABPC1 partitions into stress granules in cells under stress (6% according to Wheeler et al., Methods 126:12-17 (2017) to permit immunoprecipitations of stress granules from crude lysates by using an antibody binding PABPC1, as shown above, AIP-192482 immunoprecipitated complexes comprising PABPC1 successfully, directly from whole cell lysates.

[0407] Additional proteins identified in the MS that were present in AIP-192482 immunoprecipitates at a level of 2-fold or greater, or with a score of 2 or greater, compared to control immunoprecipitates are:

ABCF1, ACIN1, ACLY, ADAR, AGO1, AGO2, AGO3, AHNAK, ATP2A2, ATXN2, BAG2, BOP1, BUB3, CAD, CASC3, CDC5L, CELF1, CLTA, CNBP, COPA, CRNKL1, DARS, DDX17, DDX18, DDX21, DDX5, DDX54, DDX6, DHX15, DHX30, DHX36, DHX57, DHX9, DICER1, DKC1, DNTTIP2, EDC4, EEF1D, EEF2, EFTUD2, EIF2AK2, EIF2S1, EIF3D, EIF3E, EIF3I, EIF4A3, EIF4G1, EIF6, ELAVL1, EPRS, FAM120A, FBL, FMR1, FTSJ3, FUBP3, FUS, FXR1, FXR2, GAR1, GEMIN4, GNL3, GRSF1, GTPBP4, HEATR1, HIST1H1B, HIST1H1C, HIST1H3A, HNRNPA0, HNRNPA1, HNRNPA2B1, HNRNPA3, HNRNPAB, HNRNPC, HNRNPD, HNRNPDL, HNRNPF, HNRNPH1, HNRNPH3, HNRNPK, HNRNPL, HNRNPM, HNRNPR, HNRNPUL1, HNRNPUL2, IGF2BP1, IGF2BP2, IGF2BP3, ILF2, ILF3, KARS, KHDRBS1, L1RE1, LARP1, MAGOHB, MAK16, MAP1B, MATR3, MBNL1, MOV10, MRTO4, MVP, MYBBP1A, MYO1B, NAT10, NCL, NHP2, NIFK, NKRF, NOL11, NOL6, NOP2, NOP56, NOP58, PABPC1, PABPC4, PCBP2, PDCD11, PES1, PGD, PLEC, PPP1CB, PRKDC, PRKRA, PRPF19, PRPF4B, PRPF8, PRRC2C, PTBP1, PTBP3, PUM1, PURA, PURE, PWP1, PWP2, RAB14, RAB2A, RACK1, RALY, RAN, RBM14, RBM34, RBM4, RBM45, RBM8A, RBMX, RCC2, RPL10A, RPL11, RPL12, RPL13A, RPL14, RPL15, RPL17, RPL18, RPL18A, RPL19, RPL21, RPL22, RPL23, RPL23A, RPL24, RPL26, RPL27, RPL29, RPL3, RPL30, RPL32, RPL34, RPL35A, RPL36, RPL4, RPL5, RPL6, RPL7, RPL7A, RPL8, RPLP0, RPLP1, RPLP2, RPS11, RPS13, RPS17, RPS23, RPS24, RPS26, RPS27A, RPS3, RPS3A, RPSS, RPS6, RPS8, RPS9, RPSA, RRBP1, RRP1, RRP9, RRS1, RSL1D1, RTCB, RUVBL2, RYDEN, SART3, SF3B3, SKIV2L2, SLC3A2, SND1, SNRNP200, SNRNP70, SNRPB, SNRPD1, SNRPD2, SNRPD3, SON, SRP68, SRP72, SRPK1, SRPK2, SRRM2, SRSF1, SRSF10, SRSF2, SRSF3, SRSF6, SRSF7, SRSF9, SSB, STAU1, STAU2, STRAP, SYNCRIP, TARBP2, TARDBP, TCOF1, TCP1, THOC2, THOC6, TNRC6A, TOP1, TRA2A, TRA2B, TRIM25, TRIM56, TTN, U2AF2, UGDH, UPF1, UTP15, UTP18, UTP4, UTP6, WDR12, WDR36, WDR43, WDR46, WDR74, WDR75, XAB2, XRCC5, XRN2, YBX1, YBX3, YTHDC2, ZC3H7A, ZC3HAV1, ZCCHC3, and ZNF326.

[0408] To test whether RNA is part of a complex to which AIP-192482 binds, lysates were prepared from radiolabelled A549 cells and then treated with increasing amounts of RNase A (from 0.001 to 10 μg/ml) or DNAse I (20 μg/ml). Treated lysates were employed in IP using AIP-192482. Bound proteins were analyzed by SDS-PAGE followed by autoradiography. Results showed that treatment with RNase, but not DNase, eliminated proteins immunoprecipitated by AIP-192482 in an RNase dose-dependent fashion (FIG. 29). This effect was specific to the AIP-192482 antigen since no such effect was observed for EGFR binding to an anti-EGFR control antibody (data not shown). This result indicated that RNA contributes to AIP-192482 binding to its target (see, FIGS. 38A and 38B).

[0409] Additional MS analysis was performed to identify the composition of the target. IN one such analysis, RIPA lysate prepared from unlabelled A549 cells was incubated with AIP-192482-conjugated M-280 beads and then crosslinked using DTSSP (ThermoFisher). After quenching, lysates were treated with RNase (100 ng/ml). Beads were washed in high salt buffer and antigen eluted using 0.5 N ammonium hydroxide before performing nanoLC-MS/MS (MS Bioworks). In gel digestion was performed and proteins analyzed. One RNA binding protein, PABPC1, was present in high abundance in results from all MS runs and was enriched following RNase treatment (FIG. 30).

[0410] PABPC1 was expressed as a C-terminal FLAG fusion in 293T cells transiently transfected with a human PABPC1-FLAG expression plasmid and purified by anti-FLAG antibody chromatography. Purified PABPC1 was incubated with purified poly(A) RNA (56 mer) produced via in vitro transcription of a linearized plasmid template driven by a T7 promoter. Complexed PABPC1-RNA was then incubated with monovalent AIP-192482 Fab and resulting complexes resolved on a Superose 6 gel filtration column (GE Lifesciences) at a final ratio of 15:15:1 PABPC1: AIP-192482 Fab: RNA by mass. Also absorbance of column eluate and SDS-PAGE analysis of column fractions (FIG. 31) indicated that AIP-192482 Fab, PABPC1 and poly(A) RNA form a high molecular size complex that elutes from the column markedly before the individual components. RNase A was also included in an AIP-192482 incubation step prior to column chromatography. A high molecular size complex was not observed for this sample.

[0411] As explained above, MS results from crosslinked, RNAse treated immunoprecipitate from A549 cells obtained using AIP-192482 showed the presence of PABPC1 in the immunoprecipitate. PABPC3/4, MOV10, UPF1, and other proteins were also identified as components present in the immunoprecipitate.

### Example 6. Confocal Imaging Showing Localization and Components of the Complexes Targeted by the Antibodies

[0412] Immunofluorescence microscopy was performed on EMT6 tumor tissues stained with antibodies. AIP-192482 was shown to co-localize with a subpopulation of G3BP-positive structures within the EMT6 tumors. See FIG. 32A-D. The images showed an extensive overlap between AIP-192482 signal and signal for G3BP, another marker of stress granules. The results show a presence of smaller G3BP puncta that are not positive for AIP-192482. Although a subset of these G3BP-positive structures, i.e., very small puncta, are not positive for AIP-192482 immunoreactivity, in larger aggregates, which are more heterogeneous in structure, the reactivity co-locates. This suggests that AIP-192482 associates with complexes with RNPs.

[0413] The antibodies disclosed herein were shown to target protein complexes located extracellularly via confocal microscopy. As shown in FIG. 33A-D, AIP-160470 reacted where CD9 reactivity was also detected. The confocal imaging shows that the AIP-160470 reactivity is clearly extracellular in nature, which corroborates the flow cytometry data as described below. Similar confocal microscopy experiments were performed with human breast carcinoma tissue, which also showed that AIP-160470 co-localized with numerous CD9-positive vesicles about 1 μm diameter that appeared extracellular.

[0414] Additional confocal microscopy imaging showed that AIP-160470 signal co-located with RNA binding proteins, including PABPC1 and MOV10, and labeling was consistent with extracellular punctae and plasma membrane in human ovarian cancer tissue.

### Example 7. Flow Cytometry Showing the Surface Localization of the Complexes Targeted by the Antibodies

[0415] EMT6 cells were treated with a chemotherapeutic agent, doxorubicin (“DOX”) or cisplatin (“CDDP”), for 16 hours. Both DOX and CDDP are known inducers of stress granules, Vilas-Boas, et al., J Neurooncol 127:253-260 (2016); and Morita et al., Biochemical and Biophysical Research Communications 417: 399-403 (2012). The treated cells were plated in a 96 well plate and stained with AIP-192482, AIP-160470, or AIP-195694 (negative control). The cells were then stained with a secondary antibody that was conjugated with Alexa 647 and analyzed on a flow cytometer. Geometric mean fluorescence corresponding to the binding of antibodies to the EMT6 cells were plotted against concentrations of the chemotherapeutic agents used in treating cells, see FIGS. 35A-B and FIG. 36. These data show that these antibodies were bound to the surface of the cells, which complement the confocal data in FIG. 33, which shows growth of EMT6 cells in vivo also induces such surface reactivity. This extracellular, surface localization is also corroborated by the ex vivo flow analysis of Example 4.

### Example 8. Generation of Variants of AIP-160470

[0416] Antibody variants of AIP-192482 were evaluated in examples described above. Numerous additional antibody variants were generated by introducing various substitutions into the CDRs, using AIP-160470 as a parental comparison sequence. Variants were tested in an in vitro Fc receptor engagement assay. The variants included individual substitutions introduced across each CDR, as well as variants in which up to four substitutions were introduced into HCDR1, up to five substitutions were introduced into HCDR2, up to thirteen substitutions were introduced into HCDR3, up to six substitutions were introduced into LCDR1, up to three substitutions were introduced into LCDR2, and up to six substitutions were introduced into LCDR3. Combinations of variant CDR1, CDR2, and CDR3 sequences were also tested. Variants were tested for in vitro activity and a subset was tested for in vivo anti-tumor activity as described below. The CDR sequences of active variants are provided in Table 1B and Table 2B.

### In Vitro Activity

[0417] Activity of antibodies in vitro was determined using an FcR engagement assay. Variants were tested in a FcγRIIa-H ADCP Reporter Bioassay (Promega). This assay is used to measure the potency and stability of antibodies that specifically bind and activate FcγRIIa. The assay employed Jurkat cells stably expressing human FcγRIIa-H (the high-affinity H131 variant) and NFAT-induced luciferase. Following engagement of an FcγR on Jurkat effector cells by the Fc region of a test antibody binding to a target cell, intracellular signals are generated in the Jurkat cells that result in NFAT-RE-mediated luciferase activity, which can be quantified. The assay used to analyze variants is detailed in the “Detailed Methodology” section below.

[0418] The activity of variants active in the in vitro assay are shown in FIG. 39. Variants are deemed active if they exhibited an an EC₅₀ of 500 nM or less; or if they have a delta activity value, relative to AIP-160470, of at least 0.5, as shown in FIG. 39. An antibody that has a delta-value, relative to AIP-160470, of zero is considered to be inactive. The scoring of activity is described below in the “Detailed Methodology” section.

### In Vivo Activity of Variants

[0419] A subset of variants of that were active in vitro were selected to evaluate anti-tumor activity in vivo using the EMT6 mouse model. Two rounds of in vivo studies were performed. Round 1 included AIP-192482, AIP-160470, and 16 other variants. Round 2 included AIP-192482, AIP-160470, a repeated variant from round 1 (AIP-101235), and 16 additional variants generated as described herein. Thus, the in vivo studies as described in this application comprised 34 unique antibodies, with 3 of those 34 antibodies tested in both rounds. The variants tested in vivo in Rounds 1 and 2 are described in FIGS. 40 and 41, respectively, which include the EC₅₀ values and A activity rankings. Anti-tumor activity in vivo was assessed using Survival, a normalized area above the curve metric (NAAC), and a normalized growth rate metric (NGRM), where NAAC and NGRM were both developed at Atreca. A description of these assays is provided below in the “Detailed Methodology” section. As explained in the Methodology section, “in vivo active” based on the in vivo activity was assessed by a p-value≤0.05 in at least one of the analyses of survival, NAAC, and NGRM, i.e., if an antibody exhibited a p-value of less than or equal to 0.05 for survival, NAAC, and/or NGRM (any one alone being sufficient), the antibody is considered “in vivo active”. The study design is shown in FIG. 42. FIG. 43 provides data showing the tumor volume across cohorts at randomization in Round 2. FIG. 44 shows the anti-tumor effects of variants in Round 2, ranked by median Survival. FIG. 45 shows antibodies that exhibited the most efficacious responses in Round 2, as ranked by NAAC effect size. FIG. 46 shows antibodies that exhibited the most efficacious responses in Round 2, ranked by NGRM effect size. FIG. 47 shows antibodies that elicited the most complete responses in Round 2. “Complete Response” (CR) is when three consecutive tumor volume measurements (TVMs) are recorded as 0 mm³ (analysis at day 40)”. Antibodies that elicited the most complete responses refers to antibodies that elicited the most animals in the group as a complete response, e.g., if there were 6 mice in the group, and 3 of the 6 mice were a CR, then that antibody elicited 3 CRs, and the figure is showing the antibodies with the highest value of # of CRs. Data for antibodies that exhibited the most durable responses in Round 2 are provided in FIG. 48. “Durable Response” (DR) as defined in FIG. 48 represents continued tumor regression post-dosing window (Analysis at day 40). A summary of the in vivo activity of a subset of variant antibodies having anti-tumor effects is provided in FIG. 49.

[0420] The relationship between activity in the in vitro FcγRIIa assay in vivo activity and in vivo anti-tumor activity was investigated to determine if the in vitro assay predicted in vivo activity. To model the relationship between in vitro Fc-gamma receptor assay results and in vivo activity, a multiple logistic regression model with linear terms was constructed using R version 3.4.3 (The R Foundation). The model was trained on a subset of data including AIP-192482, AIP-186435, AIP-172643, AIP-172872, and AIP-114111, which results in only one false positive (AIP-163039) of all antibodies with no observed in vivo activity. For each antibody, both the EC₅₀ (nM) and delta activity were averaged over multiple runs, delta activity was normalized to AIP-160470, and the in vivo activity was assessed by a p-value≤0.05 in at least one of the analyses of survival, NAAC, and NGRM. The results are shown in FIGS. 50A and 50B. The analysis indicates that an antibody with in vitro EC₅₀ and normalized delta activity over the threshold line shown in the two FIGS. is generally predictive of exhibiting anti-tumor activity in vivo.

### Engineered FRs

[0421] The V_{H} and V_{L} sequences of AIP-160470 were also engineered to contain the framework regions from a different IGHV or IGLV gene. Framework regions are those between the defined CDR residues. The FR regions of the V_{H} of AIP 160470 correspond most closely to IGHV3-15, IMGT ID X92216 and the FR regions of the V_{L} of AIP 160470 correspond most closely to IGLV1-47, IMGT ID Z73663.

[0422] AIP-127782 has the CDRs of AIP-160470 and was engineered to have V_{H} FRs of IGHV3-72 (IMGT ID X92206) and V_{L} FRs of IGLV1-51 (IMGT ID Z73661). AIP-127782 was active in the in vitro engagement assay. Anti-tumor activity was also evaluated in vivo (below). This antibody also exhibited anti-tumor activity in the EMT6 mouse model.

[0423] Three additional antibodies were generated. AIP-180422 has the CDRs of AIP-160470, V_{H} FRs of IGHV3-72 (IMGT ID X92206) and V_{L} FRs of native IGLV1-47 (IMGT ID Z73663). AIP-166722 has the CDRS of AIP-160470, V_{H} FRs of IGHV3-72 (IMGT ID X92206), and V_{L} FRs of IGLV1-40 (IMGT ID M94116). AIP-193490 has the CDRs of AIP-160470, V_{H} FRs of IGHV3-49 (IMGT ID M99401); and V_{L} FRs of IGLV1-40 (IMGT ID M94116). These antibodies all exhibited activity in the in vitro engagement assay. These antibodies were not tested in vivo.

### Detailed Methodology

### EMT6 Syngeneic Mouse Tumor Model, In Vivo Evaluation of Anti-Tumor Activity

[0424] An EMT6 syngeneic mouse tumor model was used as described above to assess the anti-tumor efficacy of mIgG2a chimeric variants of ATRC-101. The procedure utilized is modified from DeFalco et al., Clin. Immunol. 187:37-45, 2018. EMT6 mouse tumor cells were propagated in culture by passaging cells every 2 to 3 days (1:10 subcultures). On the day of inoculation, cells were collected, counted, and diluted to 5×10⁶ cells/mL in Waymouth's medium without supplements. Cell viability was tested immediately prior to and following inoculation. Female 4-6-week old BALB/c mice were each inoculated in the right hind flank by subcutaneous injection with 1×10⁶ EMT6 cells in 0.2 mL Waymouth's media without supplements. The day of cell inoculation was designated as Study Day 0. An overage of >30% was included to achieve study groups with consistent and homogenous tumor volumes. Mouse tumors consistently became visible and palpable approximately three days after cell inoculation. Tumor volumes were measured 2-3 times prior to randomization. Mice were randomized on study day 7 using the ‘matched distribution’ randomization function of the StudyLog lab animal management software (version 3.1.399.23) to ensure homogenous tumor volumes. Mice with pre-ulcerated tumors, irregular shaped tumors, or multiple tumors were excluded from randomization. Test articles and vehicle control were prepared in formulation buffer (Dulbecco's PBS, DPBS). Diluted antibody was aliquoted in sterile, pre-sealed, single-dose borosilicate glass vials and kept at 4° C. until dosing. Starting on randomization day, test articles were dosed at 10 ml/kg based on mouse body weight via twice weekly IP injection for a total of 7 doses. All mice were dosed as scheduled or until they were removed from study based on the euthanasia criteria defined and in compliance with end points according to animal use protocol EB17-010-104 at Explora BioLabs. Tumor volumes were measured twice weekly after randomization using electronic calipers connected to the StudyLog lab animal management software (version 3.1.399.23). Tumor volumes were calculated automatically using the following equation:

Tumor Volume (mm³)=length (mm)×width²(mm)×0.5

Following test article administration, mice with tumor volumes of 0 mm³ for three consecutive measurements were considered to show a complete response (CR). Mice with consistent tumor regression that continued after closure of the dosing window were considered to show a durable response (DR).

[0425] Mice were terminated when any of the following endpoints, approved by the IACUC protocol, were observed:

Tumor volume of greater than ≥2000 mm³, tumor prevents normal animal function (posture, gait, ability to eat or drink, respiration, etc.), or extensive tumor ulceration (>50% of the area of the tumor; or if evidence is demonstrated that ulcerated tumors cause chronic pain)

[0426] Statistical analyses of tumor volumes were performed using the normalized area above the curve (NAAC) and the normalized growth rate metric (NGRM) developed at Atreca, Inc.

[0427] To determine the NAAC, the area between the tumor volume curve and the tumor volume endpoint of 2000 mm³ was divided by the total area possible through Study Day 35 post tumor inoculation. The total area possible is determined between the first time point at which all animals have a measurable tumor volume and Study Day 35 for tumor volumes between 0 mm³ to 2000 mm³. NAAC values are between 0 and 1. Individuals with a small area between the curve and the tumor volume endpoint have NAAC values closer to 0, and individuals with a larger area between the curve and the tumor volume endpoint have NAAC values closer to 1.

[0428] To determine the NGRM, the slope was first calculated for the log-transformed tumor volumes versus time, and then rescaled to 20 days post tumor inoculation. These slopes were then normalized to values between 0 and 1. Individuals with an increasing tumor volume over time have NGRM values closer to 0, and individuals with a stable or decreasing tumor volume over time have NGRM values closer to 1.

[0429] Statistically significant differences between the distributions for the treatment and control group were evaluated for NAAC and NGRM with a one-sided Wilcoxon rank-sum test, yielding a p-value using R version 3.4.3 (The R Foundation). Animals with final tumor volumes that did not reach 1800 mm³ and did not survive through 80% of the duration of the analysis were excluded from the analysis of NAAC and NGRM.

[0430] An analysis of survival was performed using the study endpoint data. Survival curves for each group were estimated with the Kaplan-Meier method. Statistical analyses were performed using a one-sided log-rank test to assess the survival advantage of a test group relative to the PBS control using R version 3.4.3 (The R Foundation). The model predicted that an antibody designated herein as AIP-192482, AIP-171142, AIP-165430, AIP-189526, AIP-122563, AIP-158623, AIP-155066, AIP-166120, AIP-133645, AIP-187893, AIP-142079, AIP-160470, AIP-102396, AIP-150055, AIP-167084, AIP-185304, AIP-134770, AIP-141887, AIP-196203, AIP-128195, AIP-116579, AIP-192329, AIP-197809, AIP-142489, AIP-167726, AIP-199834, AIP-143179, AIP-195587, AIP-153462, AIP-115363, AIP-151090, AIP-168083, AIP-161082, AIP-114196, AIP-189338, AIP-183190, AIP-110143, AIP-147176, AIP-134312, AIP-128243, AIP-156172, AIP-147389, AIP-124314, AIP-185291, AIP-135247, AIP-113513, AIP-102299, AIP-179097, AIP-109343, AIP-119622, AIP-191735, AIP-157078, AIP-153475, AIP-133650, AIP-190915, AIP-167400, AIP-109729, AIP-151709, AIP-136628, AIP-101601, AIP-146871, AIP-170053, AIP-199483, AIP-162041, AIP-180675, AIP-183133, AIP-191470, AIP-151167, AIP-106633, AIP-102624, AIP-109484, AIP-126080, AIP-161571, AIP-163039, AIP-101235, AIP-182061, AIP-181246, AIP-192216, AIP-171912, AIP-172872, AIP-167833, AIP-190051, AIP-145518, AIP-167533, AIP-112580, AIP-143155, AIP-119664, AIP-190526, AIP-114403, AIP-156760, AIP-103803, AIP-195588, AIP-145722, AIP-178251, AIP-116142, AIP-183350, AIP-127108, AIP-128147, AIP-109510, AIP-104086, AIP-143132, AIP-170105, AIP-169636, AIP-152243, AIP-138776, AIP-103817, AIP-130491, AIP-188155, AIP-167246, AIP-106139, AIP-198351, AIP-159326, AIP-192275, AIP-190761, AIP-166832, AIP-148062, AIP-129145, AIP-111240, AIP-153888, AIP-130915, AIP-109048, AIP-170569, AIP-154873, AIP-159037, AIP-186826, AIP-156514, AIP-157122, AIP-173276, AIP-150485, AIP-166847, AIP-124013, AIP-126285, AIP-168605, AIP-190274, AIP-136060, AIP-180422, AIP-166722, AIP-127782, AIP-189473, AIP-192571, AIP-112328, AIP-125258, AIP-150199, AIP-125062, AIP-177193, AIP-115388, AIP-107759, AIP-170221, AIP-143369, AIP-189475, AIP-102833, AIP-157045, AIP-175775, AIP-154181, AIP-125984, AIP-160829, AIP-184744, AIP-128136, AIP-181273, AIP-153125, or AIP-131972 will have anti-tumor activity.

### FcγRIIa Engagement Assay Using EMT6 Tumor Cells

[0431] The target of the anti-tumor antibodies as described herein are expressed by tumor cells when they are grown in vivo, but not expressed by tumor cells grown under standard culture conditions in vitro. The assay is performed on cells ex vivo, i.e., tumor cells that were grown as a tumor graft in a syngeneic (immune matched) mouse in vivo then harvested and processed within 24-48 hrs.

[0432] The assay has four parts: A. Preparation of stock EMT6 mouse breast cancer cells in vitro; Inoculation and growth of EMT6 tumors in Balb/c mice in vivo; C. Harvest of EMT6 tumor cells and preparation of ex vivo cell bank; Use of ex vivo EMT6 cells for the FcγR2a engagement assay. The protocol for each step is provided below.

### A. Preparation of EMT6 Mouse Breast Cancer Cells In Vitro

[0433] 1. Remove vial of EMT6 cells from liquid nitrogen
2. Thaw in 37° C. water bath until almost completely thawed (small chunk of ice should remain)
3. Add thawed cell suspension (1 ml) to 9 ml of EMT6 cell culture media in 50 ml tube
4. Spin, 300×g, room temperature, 5 min
5. Aspirate supernatant and re-suspend cells in 15 ml EMT6 media
6. Add cell suspension to T75 TC-treated cell culture flask
7. Grow cells in a humidified incubator at 37° C. with 5% CO2
8. Supply fresh media on Monday, Wednesday, and Friday
9. Expand cells when they reach 80% confluency

[0434] a. Aspirate cell culture media from flask

[0435] b. Wash once with 10 ml PBS w/o Ca²⁺Mg²⁺

[0436] c. Add 2 ml TrypLE (#12604021, Invitrogen)

[0437] d. Incubate for 5 min at 37° C.

[0438] e. Gently tap flask to detach cells (confirm under microscope)

[0439] f. Add 7 ml NGM to dish, gently pipette up and down to resuspend

[0440] g. Split 1:10 in new flask

[0441] h. Add media. Gently pipette up and down to create homogenous suspension

[0442] i. Grow cells in a humidified incubator at 37° C. with 5% CO₂

10. Once cells reach 80% confluency, harvest for frozen aliquots:
11. Detach cells as described above and pool in 50 ml tube
12. Take 10 μl cell suspension and add 10 μl Trypan Blue
13. Mix well and count cells using a Countess II cell counter (#AMQAX1000, Fisher Scientific). Calculate cell viability
14. Spin, 300×g, room temperature, 5 min
15. Resuspend in pure FBS at 4×10⁶ cells/ml
16. Add equal amount of FBS containing 20% DMSO prepared beforehand. (Do not add 100% DMSO directly to cells)
17. Mix well by gently pipetting up and down
18. Aliquot 1 ml (2×10⁶ cells) of cell suspension into cryo tubes and freeze in Mr Frosty (51000001, ThermoFisher) at −80° C.
19. Transfer to long-term liquid N₂ storage the next day

### B. Inoculation and Growth of EMT6 Tumors in Balb/c Mice In Vivo

[0443] Thawing EMT6 Cells from Master Bank
1. Thaw 1 vial of EMT6 cells from Section A in a 37° C. water bath. Transfer cells to a 15 ml conical tube. Add 10 ml of normal growth media. Centrifuge at 300×g, room temperature, 5 minutes. Aspirate supernatant. Resuspend cell pellet in 15 ml NGM and seed in T75 flask
2. On day 2, passage cells from T75 into T225 using the above described method for passaging cells
3. On day 4, passage cells 1:10 (1:12 if over the weekend)
4. On day 6 or 7, passage cells 1:10 (1:12 if over the weekend/if larger amounts of cells are needed, expand at this stage)
5. On day 8 or 9, expand cells into 10 flasks
6. On day 10 or 11, harvest cells for in vivo injection:

### EMT6 Tumor Inoculation

[0444] A. Aspirate cell culture media from flask
B. Wash once with 10 ml PBS w/o Ca′ Mg′ (20 ml for T225)

### C. Add 2 ml TrypLE (#12604021, Invitrogen) (5 ml for T225)

### D. Incubate for 5 min at 37° C.

[0445] E. Gently tap flask to detach cells (confirm under microscope)
F. Flush cells off the flask with 7 ml (15 ml for T225) EMT6 media
G. Count cells and determine viability with Trypan Blue
a. Do not proceed if viability is below 85%

### H. Spin, 300×g, RT, 5 min

[0446] I. Aspirate supernatant
J. Resuspend cells in Waymouth's media without FBS to achieve 5×10⁶ cells/ml

[0447] a. 1 T225 cell culture flask will yield around 18-24×106 viable cells

K. Keep cells on ice from here on
L. Anaesthetize female, 8 week old BALB/c mice using isoflurane inhalation
M. Shave left flank of BALB/c mice
N. Use 1 ml syringe with 25 G needle to inject 200 ul cell suspension (1×106 cells total) subcutaneous

[0448] a. Make sure you don't see reflux of cells back into the syringe

[0449] b. Make sure cell suspension doesn't leak out of injection site

O. Check cell counts and viability after inoculation has been performed

[0450] a. Should be in a 10% window

P. Monitor tumor growth using calipers

### C. Harvest EMT6 Tumors and Preparation of Ex Vivo Cell Bank

[0451] 1. Harvest tumors once they reach 500-800 mm³ as measured with calipers
2. Remove all surrounding skin and muscle
3. Transfer tumors into RPMI media on ice, containing Primocin at 1/500 dilution (100 μg/mL)
4. (Tumors can be pooled and volumes scaled up proportionately)
5. Prepare Tumor Digestion Mix (per 1 tumor)
a. 3.3 ml HBSS w Ca²⁺Mg²⁺
b. 33 ul Collagenase A (final concentration: 0.2 mg/ml)
c. 33 ul Dispase II (final concentration: 0.8 mg/ml)
d. 17 ul DNase (final concentration: 0.02 mg/ml)

### e. 6.6 uL Primocin

[0452] f. Mix and filter through 0.22 micron cellulose acetate filter to sterilize
6. Recover tumors from RPMI. Cut tumors into small pieces and add 1 ml digestion mix per tumor 7. Incubate in either FACS tube with cap, 15, or 50 ml screwcap tube at 37° C. continuously rotating for 15 min
8. Allow cells to settle for 30 seconds
9. Carefully remove supernatant with 1 ml pipette and add to 3 ml of pure FBS on ice, containing Primocin at concentration of 100 μg/mL
10. Add another 1 ml of digestion mix and repeat 2× for a total of 3×
11. (you can cut the top off a 1 ml pipette tip and use it for mechanical dissociation in between the digestion steps)
12. After the last digestion, the cell suspension should pass through a 1 ml micropipette tip
13. Filter collected cells in FBS through 100 micron cell strainer into a new 50 ml tube

### 14. Spin, 300×g, 4° C., 10 min

[0453] 15. Remove supernatant and resuspend cells in 1 ml pure FBS (with Primocin at 100 μg/mL)
16. Count and adjust cells to 6×106 cells/ml with FBS (with Primocin at 100 μg/mL)
a. Due to debris, cell counts with the Countess II or a Hemocytometer can be inaccurate
i. Staining of nucleated cells with 1:1000 Draq5 (5 mM stock concentration) and counting on a flow cytometer in the APC channel is recommended
ii. Addition of DAPI at 1:1000 allows for live cell gating of the nucleated population (Violet laser required)
1. Prepare staining solution by adding 1 μl of Draq5 (5 mM stock) and 1 μl of DAPI to 1 ml of PBS
2. Add 40 μl staining solution to a round bottom 96 well 3. Add 10 μl cell suspension and mix well
4. Incubate for 5 min at room temperature in the dark
5. Analyze sample by flow
a. Gate on Draq5 (APC channel) positive cells first
b. Determine DAPI (BV421 channel) negative cells within the Draq5 positive population
6. If flow cytometer can measure events/μl, you can calculate the cell number directly (Cytflex can do that)
7. If flow cytometer can not measure events/μl (like most BD instruments), you would need to add counting beads to get cell counts
b. Viability should be above 75%
17. Resuspend cells at 4×106 cells/ml with FBS (with Primocin at 100 μg/mL)
18. Add equal amount of FBS containing 20% DMSO and 100 μg/mL Primocin
19. Mix well by pipetting up and down
20. Aliquot 1 ml (2×106 cells) of cell suspension into cryo tubes and freeze in Mr Frosty at −80° C.
a. Expected number of cells ˜10×10\hat{ }6 cells/tumor
21. Transfer to long-term liquid N2 storage the next day
a. Take 1 sample vial and thaw according to the protocol “Thawing of ex vivo cells” b. Control cell counts

### D. Use of Ex Vivo EMT6 Cells for Engagement Assay

### Thawing Ex Vivo Cells

[0454] 1. Thaw a vial in the 37° C. water bath
2. Transfer the contents of the vial to a 50 ml conical tube
3. Add 19 mL of RPMI+2% FBS to the cells drop-by-drop, while swirling the suspension

### 4. Spin, 300×g, 4° C., 5 min

### 5. Resuspend in 1 mL PBS+2% FBS+2 mM EDTA

### 6. Spin, 300×g, 4° C., 5 min

### 7. Resuspend in 2 mL Assay Buffer (RPMI1640+4% Low IgG Serum)

### 8. Resuspend in 1 ml Assay Buffer

[0455] 9. Count and adjust cells to 0.5×10⁶ cells/ml in Assay Buffer
a. Perform cell count as described in Section C; 16a

### FcγRIIa Engagement Assay (Promega Kit #G9991)

[0456] 1. Prepare antibody serial dilutions in Assay Buffer at 1.5×excess.
a. 75 ul total assay volume
b. 10⁻⁶M starting concentration
c. log dilutions in a 6 point dose response curve in triplicates
2. add 25 ul of the antibody dilution to a white, flat bottom 96 well plate.
a. use only inner 60 wells
b. Fill unused wells with 75 ul assay buffer
3. Add 25 ul ex vivo cells to each well containing antibody dilution
a. Gently tap the plate to mix cells with antibody
4. Incubate for 15 minutes at 37° C., 5% CO2.
5. Thaw a vial of FcγRIIa-H Effector cells (0.62 mL)(Promega kit 3G991) in the 37° C. water bath
a. Remove vial from 37° C. as soon as it is thawed
6. Transfer the contents of the vial to a conical tube containing 5.3 mL of Assay Buffer
7. Mix by inverting the tube 4-5 times
8. Count and adjust cells to 0.5×10⁶ cells/ml
a. Cell counts can be performed using a regular cell counter or hemocytometer 9. Add 25 ul of the FcγRIIa-H effector cells to the opsonized target cells
a. E:T ratio of 1:1
10. Gently shake the plates back and forth to mix the contents (75 ul total volume)
11. Incubate for 5 hours at 37° C., 5% CO2
12. After 5 hours, prepare the Bio-Glo Luciferase solution by adding the whole bottle of Bio-Glo™
Assay Buffer to the Bio-Glo Luciferase Assay substrate (10 mL total per kit).
13. remove plate from incubator
14. Add 75 ul of the Bio-Glo™ mix to each reaction well
15. Incubate at RT in the dark for 15 minutes
16. Measure luminescence in a suitable plate reader
17. Plot curves and calculate EC50 values

### Reagents and Buffers

### EMT6 Complete Media (Normal Growth Media, NGM)

[0457] Waymouth's MB 752/1 Medium+2 mM L-glutamine+15% fetal bovine serum (FBS)+1% pen/strep

### Assay Buffer

[0458] RPMI1640+4% low IgG fetal bovine serum (FBS)

### Collagenase A (Sigma-Aldrich, #10103586001)

[0459] 1. Add HBSS with Ca²⁺Mg²⁺ to create a stock solution of 50 mg/ml
2. Invert tube multiple times
3. Incubate for 5 min at room temperature
4. Aliquot into 1.5 ml snap-cap tube
5. Store at −20° C. for up to month
6. Avoid repeating freeze/thaw cycles

### Dispase II (Sigma-Aldrich, #D4693-1G)

[0460] 1. Reconstitute 1 g of Dispase II in 10 mL molecular biology grade water with 10 mM Sodium Acetate (pH 7.5) and 5 mM Calcium Acetate
2. Invert tube multiple times
3. Incubate for 60 min at room temperature
4. Aliquot into 1.5 ml snap-cap tube
5. Store at 4° C. for up to month

### DNAse (Sigma-Aldrich, #4536282001)

[0461] 1. Add HBSS with Ca²⁺Mg²⁺ to create a stock solution of 2 mg/ml
2. Invert tube multiple times
3. Incubate for 5 min at room temperature
4. Aliquot into 1.5 ml snap-cap tube
5. Store at −20° C. for up to 7 days
6. Avoid repeating freeze/thaw cycles

### Example 9. Evaluation of Antibody for Cancer Therapy—Overview

[0462] An antibody for use in treating cancer was additionally evaluated in the following examples. The antibody is referred to in this example as ATRC-101. It is a fully human immunoglobulin G, subclass 1 (IgG1)/lambda antibody that comprises the V_{H} and V_{L} regions of AIP-160470. The amino acid sequences of the heavy and light chains are provided in SEQ ID NOS:1723 and 1724, respectively. ATRC-101 is a sequence variant of an antibody discovered in an antibody repertoire generated by Immune Repertoire Capture® (IRC™) technology from plasmablast B cells isolated from a patient with non-small cell lung cancer (NSCLC) adenocarcinoma. At the time of sample collection, the patient was undergoing treatment, which included, in part, an anti-programmed death receptor 1 (PD-1) monoclonal antibody.

[0463] The safety profile of ATRC-101 was established in a series of in vitro cytokine release and tissue cross-reactivity assays as well as a repeat-dose safety study in a syngeneic disease model (female BALB/c mice inoculated with EMT6 tumor cells). A non-Good-Laboratory-Practice (GLP) 4-week repeat-dose toxicity study in cynomolgus monkeys was also conducted to evaluate potential non-target-related toxicity of ATRC-101.

[0464] The design of the nonclinical safety package for ATRC-101 reflects the characteristics of the antibody's target and proposed mechanism of action. The ATRC-101 target is a tumor-associated extracellular complex comprising an RNA binding protein and (poly(A) RNA). Although poly(A) RNA and RNA binding proteins such as the polyadenylate binding protein family members are widely expressed across normal human, rhesus monkey, and mouse tissues, ATRC-101 binds preferentially to tumor cells. Tumor-selective binding of ATRC-101 was observed in a variety of human tumor types including NSCLC, breast cancer, CRC, ovarian cancer, and melanoma, where tumor cells were positive, but adjacent tissues were not. Binding to mouse EMT6 tumor cells extracted from tumor tissues is lost over time when these cells are cultured in vitro. In addition, binding of ATRC-101 to human tumor tissues was shown to be dependent on the ribonuclease-sensitive component of the complex. ATRC-101 does not bind to tumor adjacent normal cells, normal cynomolgus monkey tissues, and most normal mouse tissues. Together, these data indicate that the ATRC-101 target is tumor-associated, and that cell-surface localization is dependent on the context of tumor growth in vivo. The tumor-association may be based on misfolding, mis-localization, post-translational modification and/or yet unspecified factors. Therefore, the mouse and cynomolgus monkey are not appropriate species for toxicology testing due to no, or very low, ATRC-101 target expression in normal animal tissues.

[0465] Pharmacological evaluations in preclinical models indicate that once ATRC-101 binds to the target expressed on tumor cells, Fc-dependent interaction with innate immune cells shifts the constitution of lymphoid and myeloid cell populations present in the tumor microenvironment from phenotypes associated predominantly with pro-tumorigenic and immune-suppressive activities toward phenotypes associated with anti-tumorigenic and more pro-inflammatory activities. ATRC-101 does not appear to mediate antibody-dependent cell cytotoxicity (ADCC) or complement-dependent cytotoxicity (CDC) in vitro. All available data indicate that binding of ATRC-101 to its target does not trigger or abrogate any signal transduction pathways.

[0466] ATRC-101 does not bind to normal human peripheral blood mononuclear cells (PBMCs). Furthermore, ATRC-101 does not induce cytokine release in vitro in either PBMC or whole blood-based assays. Thus, ATRC-101 is considered to pose a low risk of triggering cytokine release in humans.

[0467] To support preclinical efficacy and safety studies in mice and pharmacokinetic/toxicokinetic studies in cynomolgus monkeys, sensitive and specific liquid chromatography-tandem mass spectrometry (LC-MS/MS) and enzyme-linked immunosorbent assay (ELISA) methods were developed for the detection of ATRC-101 in mouse and monkey serum, respectively.

[0468] The pharmacokinetic profile of ATRC-101 was characterized in a single-dose study and a repeat-dose study in cynomolgus monkeys. Following a single intravenous (IV) bolus administration to cynomolgus monkeys at dose levels of 1, 10, and 30 mg/kg, the time of maximum serum concentration (Tₘₐₓ) was generally observed between 0.083 and 1 hour post-dose. Half-lives (T_{1/2}) ranged from 177 to 225 hours. The apparent clearance rate (CL) and apparent volume of distribution (Vd) ranged between 0.15 and 0.436 mL/hr/kg and 51.4 and 117 mL/kg, respectively. Systemic exposure to ATRC-101 increased with dose within the range tested and the increase was approximately dose proportional. In the 4-week repeat-dose IV toxicity and toxicokinetics study in cynomolgus monkeys, where animals received 4 weekly doses of ATRC-101 by IV administration on Days 1, 8, 15 and 22, Tₘₐₓ was generally observed at 0.75 hours post start of infusion (SOI). The terminal elimination phase was not characterized for any animals due to the relatively sustained concentrations observed after Tₘₐₓ. Systemic exposure increased with dose within the range tested and the increase was approximately dose proportional. There was no notable gender-related difference in exposure. Following repeated administration, systemic exposure on Day 22 was generally higher compared to Day 1, with individual accumulation ratios ranging from 1.64 to 2.17.

[0469] The safety of ATRC-101 and the MFC-042 chimera (harboring an identical human Fv region of ATRC-101 but expressed with a mouse IgG2a Fc region; also referred to as AIP-160470-mIgG2a) was evaluated in the EMT6-BALB/c syngeneic breast cancer model. The following safety parameters were evaluated in this study: mortality/moribundity, clinical signs, body weights, clinical pathology (hematology and clinical chemistry), serum cytokine evaluation, serum test article concentrations, gross necropsy findings, organ weights, and histopathologic examinations (9 organs plus tumor tissue in tumor-bearing animals). Repeat-dose intraperitoneal (IP) administration of MFC-042 at dose levels of 0, 0.1, 0.3, 1, 3, 10 and 30 mg/kg or ATRC-101 at dose levels of 0, 1, 10 and 30 mg/kg, to naïve and EMT6 syngeneic breast cancer tumor-bearing female BALB/c mice was well-tolerated and no toxicologically significant effects were noted in any of the parameters examined. Based on these safety assessment results, the no-adverse-effect-level (NOAEL) was considered to be 30 mg/kg for MFC-042 and ATRC-101 in naïve and EMT6 syngeneic breast cancer tumor-bearing female BALB/c mice.

[0470] A non-GLP 4-week toxicity study in cynomolgus monkeys was conducted to evaluate the potential non-target related toxicity of ATRC-101. In this study, the following parameters were evaluated in this study: mortality/moribundity, clinical signs, qualitative food consumption, body weights, clinical pathology (hematology, clinical chemistry, and urinalysis), cytokines, TK parameters, organ weights, macroscopic and microscopic examinations (20 organs/tissues, including the brain, heart, lung, liver, kidney, and pancreas). Administration of ATRC-101 by intravenous (IV) infusion once weekly for 4 weeks was well tolerated in cynomolgus monkeys at all dose levels administered: 10, 30, and 100 mg/kg/week. The NOAEL was considered to be 100 mg/kg/week, with associated maximum observed concentration (Cₘₐₓ) values of 2410 μg/mL for males and 2690 μg/mL for females, and area under the concentration time curve from time zero to time of last measurement (AUC₀₋ₜ) values of 185000 μg·hr/mL for males and 186000 μg·hr/mL for females on Day 22 (528 days).

[0471] ATRC-101 and chimeric ATRC-101 variants demonstrate anti-tumor activity in several syngeneic mouse tumor models. Anti-tumor activity of ATRC-101 is enhanced in combination with a PD-1 inhibitor.

[0472] There was no clinical evidence of irritation or local tolerance issues at ATRC-101 injection sites after repeat dosing (once weekly for 4 doses total) at doses up to 100 mg/kg (concentration: 20 mg/mL) in cynomolgus monkeys.

[0473] In the GLP tissue cross-reactivity study in normal human tissues, staining with ATRC-101 was observed in some human tissues. However, virtually all of the staining was cytoplasmic in nature and therefore is not considered a toxicological concern because it is unlikely that ATRC-101 will cross cell membranes or interact directly with components of the cytoplasm.

[0474] The pharmacological evaluation of ATRC-101 was carried out using the clinical candidate ATRC-101 as well as sequence variants of ATRC-101 expressed with human or mouse Fc regions based on study objectives and available animal models/assays. An overview of the relationship between ATRC-101 and the sequence variants is shown in FIG. 51.

[0475] The following Examples provide further details of the studies summarized above

### Example 10. ATRC-101 Target Expression in Tumor Tissues and Cell Lines

[0476] Chromogenic IHC, immunofluorescence microscopy, and flow cytometry were used to evaluate ATRC-101 target expression (defined herein by reactivity to a binding antibody) in (i) multiple human tumor tissues, (ii) mouse tumor tissues, and (iii) human and mouse tumor cell lines.

[0477] In an analysis of a variety of human tumors, AIP-160470-mIgG2a bound in a highly selective manner to CRC, TNBC, and melanoma tumor tissues, but not to adjacent tissues FIG. 52.

[0478] The prevalence of target binding was assessed across a set of human tumor cores. Samples were scored as non-reactive if staining was negative or faint and reactive if moderate, positive, or robust. AIP-160470-mIgG2a target binding was present in greater than 50% of tested tumor cores for NSCLC (65%), breast cancer (65%), CRC (57%), and ovarian cancer (58%). Melanoma showed 43% reactivity. Liver cancer showed 19% reactivity. Cancer subtype-specific differences in the proportion of reactive cores were observed.

[0479] These studies showed that the target of ATRC-101 was highly expressed in several human tumor tissues, including NSCLC, CRC, TNBC, melanoma, and ovarian cancer. The study data indicate that the ATRC-101 target is tumor-associated, and that cell-surface localization is dependent on the context of tumor growth.

[0480] Immunofluorescence was used to assess whether nuclease digestion of RNA influenced the chimeric antibody AIP-160470-mIgG2a binding to human estrogen receptor positive (ER+) breast cancer. Pre-treatment of fresh frozen tissue sections with RNase A and RNase H abrogated binding of the chimeric antibody AIP-160470-mIgG2a to human ER+breast cancer in a concentration-dependent manner FIG. 53. In contrast, deoxyribonuclease (DNase) I pre-treatment did not abrogate binding. This data indicates that ATRC-101 target expression, as assessed by immunofluorescence, is dependent on the RNase-sensitive component of the target.

[0481] ATRC-101 target expression was evaluated on mouse EMT6 tumor cells that were grown in a syngeneic BALB/c mouse. The chimeric antibody AIP-160470-mIgG2a bound to EMT6-BALB/c syngeneic tumor cores, but not adjacent tissues.

[0482] Surface expression of the ATRC-101 target was also assessed by flow cytometry on mouse and human-derived tumor cell lines. The chimeric antibody AIP-160470-mIgG2a bound to mouse ex vivo EMT6-BALB/c syngeneic tumor cells, dissociated, and immediately stained. Binding was not detected when mouse ex vivo EMT6 cells were subsequently cultured in vitro for two or more days prior to staining. When the mouse EMT6 cell lines were only grown in vitro prior to staining and not grown as subcutaneous grafts in BALB/c mice, no binding was observed. Surface binding was also observed to ex vivo Renca, CT26, and LLC1 tumor cells that were grown as subcutaneous grafts in mice prior to staining. No surface binding was observed for 21 human tumor cell lines grown in vitro.

[0483] Together, the observations from IHC, immunofluorescence, and flow cytometry indicate that the ATRC-101 target is a tumor-associated complex containing RNA and that the expression of this complex and its surface localization are dependent on how the tumor cells were grown.

### Example 11. ATRC-101 Target Expression in Normal Human, Cynomolgus Monkey and Mouse Tissues and Normal Human Blood Cells

[0484] Chromogenic IHC and immunofluorescence were used to evaluate ATRC-101 target expression (defined herein by reactivity to a binding antibody) in (i) normal human tissues, (ii) normal cynomolgus monkey tissues, and (iii) normal mouse tissues.

[0485] Specific binding of AIP-160470-mIgG2a was evaluated by immunofluorescence in two formalin-fixed paraffin-embedded (FFPE) tissue microarrays representing 30 normal human tissue types (FDA808J-1 and FDA808J-2). The chimeric antibody AIP-160470-mIgG2a was used to minimize non-specific interactions. Tumor-selective binding was observed in human adenocarcinoma, which was included as a positive control (FIG. 54A).

[0486] AIP-160470-mIgG2a immunoreactivity was observed on normal tissues of the 90 cores. Only the stomach and cerebellum displayed a diffuse non-definitive signal over isotype control, each in one of three cores with signs of autolysis. A faint heterogeneous signal was detected in serous acinar glandular epithelium in tongue (head and neck salivary gland), which are secretory in nature, increasing the likelihood of non-specific binding. In contrast to AIP-160470-mIgG2a, the commercial polyclonal antibody raised against PABPC-1 showed immunoreactivity to both tumor tissues and normal tissues (FIGS. 54A and 54B). In a separate analysis, tumor-selective binding was also observed by IHC assessment of colorectal cancer and normal human liver, kidney, stomach, heart, pancreas, and lung tissues.

[0487] The potential species cross-reactivity of ATRC-101 was assessed in normal cynomolgus monkey and mouse tissues in a non-GLP study. The concentration of ATRC-101 antibody used for this assessment was shown to preferentially and distinguishably label viable malignant cells within the positive control mouse EMT6 tumor and not label the adjacent skin or stroma. In fresh frozen normal cynomolgus monkey tissues representing 15 organ types, no definitive staining over isotype control was detected under these conditions. In fresh frozen normal mouse tissues representing 30 distinct organ types, most showed no definitive reactivity. Faint to minimal staining was observed in mouse oral cavity, stomach, small intestine, and spleen.

[0488] No binding of chimeric parental antibody AIP-192482-mIgG2a and chimeric antibody AIP-160470-mIgG2a to normal human PBMC preparations was observed by flow cytometry at concentrations at which binding to ex vivo EMT6-BALB/c syngeneic tumor cells was observed.

### Example 12. ATRC-101 and ATRC-101 Variant Binding Affinity and In Vitro Activity

[0489] As explained above, the in vitro activity of ATRC-101 was assessed in the Target and Effector Dual Engagement Assay. This assay uses engineered Jurkat cells carrying a luciferase reporter and ex vivo EMT6 tumor cells (from frozen stock) to detect dual Fv and Fc engagement. The FcγRIIa-H reporter gene is activated in the presence of EMT6 ex vivo cells and ATRC-101 protein, and results in the expression of luciferase. The activity of the reporter gene is determined by the Bio-Glo™ Luciferase Assay System.

[0490] In this assay, ATRC-101 induced luciferase expression with a half-maximal effective concentration (EC₅₀) of 67.8±37 nM. When the assay was performed using cultured EMT6 cells, which do not express detectable levels of ATRC-101 target, no luciferase signal was detected. Similarly, an aglycosylated Fc-variant of ATRC-101, which harbors an N297A mutation and therefore lacks Fc-effector function, did not induce luciferase signal in this assay. These data indicate that both target binding to the Fv region and FcγR2a engagement by the Fc region are required for activity of ATRC-101 in the Target and Effector Dual Engagement Assay.

[0491] The in vitro potency in the Target and Effector Dual Engagement Assay was greatest for ATRC-101 (AIP-160470-hIgG1), followed by the sequence-optimization variant AIP-133645-hIgG1, and then the parental antibody AIP-192482-hIgG1. Similarly, in vivo potency in the EMT6-BALB/c syngeneic mouse tumor model was greatest for the chimeric variant of ATRC-101 (AIP-160470-mIgG2a), followed by the chimeric variant AIP-133645-mIgG2a, with the chimeric variant of the parental antibody AIP-192482-mIgG2a showing the lowest anti-tumor effect.

[0492] In vitro ADCC and CDC assays were performed to assess whether ADCC or CDC contribute to the mechanism of action of ATRC-101. The ADCC assay used a CD16-transfected NK92 cell line as effector cells and, as target cells, either tumor-derived ex vivo EMT6 cells, which express the target, or cultured EMT6 cells, which do not express target. The chimeric antibody AIP-160470-mIgG2a did not demonstrate cell killing activity of mouse ex vivo EMT6, ex vivo Renca, or ex vivo LLC1 cells in this assay, while a positive control antibody AIP-171125-mIgG2a demonstrated killing of various target cells.

[0493] Similarly, AIP-192482-mIgG2a did not show CDC activity in the CDC assay using rabbit sera as a source of complement and tumor-derived ex vivo EMT6 cells as target cells. These data indicate that ATRC-101 does not appear to act through either ADCC or CDC mechanisms.

### Assessment of Cytokine Release Induced by ATRC-101 in Human Peripheral Blood Mononuclear Cell and Whole Blood In Vitro Assays

[0494] Systemic activation of immune cells by monoclonal antibodies can lead to cytokine release syndrome. It has been shown that an in vitro cytokine release assay (CRA), using immobilized antibody and human PBMCs, is predictive of cytokine release syndrome in patients. The ability of ATRC-101 to induce cytokine release in vitro was assessed using human PBMC and whole blood versions of a CRA at Charles River Laboratories (Portishead, UK).

[0495] In the PBMC version of the CRA, the ability of ATRC-101 to induce cytokine release was assessed on PBMCs obtained from multiple healthy human donors. This assay format uses test and control articles immobilized at 1 μg/well and is considered capable of predicting cytokine storm responses similar to those observed during the phase I clinical trial of the therapeutic monoclonal antibody TGN1412. Anti-CD28 clone 28.1 (Ancell Corp., Bayport, Minn., USA) and muromonab anti-CD3 (Orthoclone OKT3) were used as positive controls in the PBMC CRA. A human IgG1 (hIgG1) isotype antibody (targeting β-galactosidase), formulation buffer, and Dulbecco's phosphate-buffered saline (DPBS) were included as negative controls.

[0496] In the whole blood version of the CRA, the ability of ATRC-101 to cause cytokine release was assessed on whole blood from multiple healthy, human donors. This assay format uses test articles in solution at a concentration of 1.1 nM. Anti-CD28 and alemtuzumab (anti-CD52) were used as positive controls and hIgG1 isotype antibody, formulation buffer, and DPBS were included as negative controls in this assay format.

[0497] In both the PBMC and whole blood versions of the CRA, the cytokine release observed with ATRC-101 was comparable to the cytokine release observed with the hIgG1 isotype control. Cytokine release related to ATRC-101 was generally significantly lower than that observed in response to stimulation with the relevant positive control antibodies. Based on these data, ATRC-101 poses a low risk of triggering cytokine release in humans.

### Example 13. In Vivo Pharmacology

[0498] ATRC-101 was shown to bind to in vitro reconstituted complexes containing in vitro transcribed RNA and (i) recombinant human/non-human primate PABPC-1 or (ii) recombinant mouse PABPC-1 with comparable affinity and to bind to tumor cores from both human and mouse. Therefore, the in vivo pharmacological evaluation of ATRC-101 in syngeneic mouse models was carried out using the clinical candidate ATRC-101 as well as sequence variants of ATRC-101 expressed with human or mouse Fc regions. Mouse chimeric variants are expected to have higher anti-tumor efficacy in syngeneic mouse models than hIgG1, since hIgG1 has a reduced affinity for mouse Fc gamma receptors.

### Preclinical Efficacy and Safety Assessments of MFC-042 and ATRC-101 in Syngeneic EMT6 Breast Cancer Model (Studies ATRC-101.PD.18.01 and ATRC-101.PD.18.02)

[0499] The objective of this study was to evaluate the preclinical efficacy and safety endpoints of MFC-042 (harboring an identical human Fv region of ATRC-101 but expressed with a mouse IgG2a Fc region; also referred to as AIP-160470-mIgG2a) and ATRC-101 administered to naïve and EMT6 syngeneic breast cancer tumor-bearing female BALB/c mice. This study was composed of two parts that were conducted concurrently: assessment of MFC-042 (Part A; ATRC-101.PD.18.01) and ATRC-101 (Part B; ATRC-101.PD.18.02).

[0500] In Part A of the study, seven groups of female BALB/c mice (15 animals/group) with established subcutaneous EMT6 tumors (group mean tumor volumes (MTV)=112 to 113 mm³) were dosed via intraperitoneal (IP) injection with 0 (vehicle), 0.1 mg/kg, 0.3 mg/kg, 1 mg/kg, 3 mg/kg, 10 mg/kg, or 30 mg/kg MFC-042 on Days 1, 4, 8, 11, and 15. Two groups of non-tumor bearing (naïve) mice (15 animals/group) were treated with vehicle or 30 mg/kg MFC-042 at the same dose regimen. Animals were euthanized for necropsy examinations on Day 16.

[0501] In Part B of the study, four groups of female BALB/c mice (15 animals/group) with established subcutaneous EMT6 tumors (group MTV=108 mm³) were dosed via IP injection with 0 mg/kg (vehicle), 3 mg/kg, 10 mg/kg, or 30 mg/kg ATRC-101 on Days 1, 4, 8, 11, and 15. Two groups of naïve mice (15 animals/group) were treated with vehicle or 30 mg/kg ATRC-101 at the same dose regimen. Animals were euthanized for necropsy examinations on Day 16.

[0502] The following parameters and end points were evaluated in this study: mortality/moribundity, clinical signs, body weights, overall efficacy assessment, clinical pathology parameters (hematology and clinical chemistry), serum cytokine evaluation, serum test article concentrations, gross necropsy findings, organ weights, and microscopic examinations (9 organs and plus tumor tissue in tumor-bearing animals). Overall efficacy was determined based on tumor growth inhibition (TGI), defined as the percent difference between MTVs of treated and control groups, and was assessed on Day 15 (Part A) or Day 14 (Part B).

[0503] Repeat-dose IP administration of MFC-042 and ATRC-101 to naïve and EMT6 breast cancer tumor-bearing female BALB/c mice was well tolerated at dose levels up to 30 mg/kg.

[0504] In Part A (FIG. 55A), the MTV of Group 1 (vehicle control) had reached 787 mm³ on Day 15, with individual tumor volumes ranging from 288 to 1352 mm³. By comparison, MFC-042 treatment groups at lower doses (Groups 2 through 4) did not differ statistically from the vehicle control group or each other (p>0.05 using the Mann-Whitney U test), with MTVs of 719, 847, and 726 mm³, equivalent to 9, −8, and 8% TGI for treatment groups that received 0.1, 0.3 and 1 mg/kg MFC-042, respectively. Higher doses of MFC-042 (3, 10, and 30 mg/kg) reduced MTVs to 221 (72% TGI), 92 (88% TGI) and 196 mm³ (75% TGI), respectively, and differed significantly from Group 1 (p<0.01 for 3 mg/kg and p<0.001 for 10 and 30 mg/kg). Notably, all three high doses achieved TGIs that were well above the 60% threshold considered by the contract research organization to indicate potential therapeutic activity. Minimal anti-tumor activity was observed at 3 mg/kg with serum concentrations ranging from 16.6 to 20.3 μg/mL. Maximal anti-tumor activity was noted at 10 mg/kg with measured serum concentrations ranging from 21.9 to 87.5 μg/mL at 6 hours post-dose on Day 1. Microscopically, tumors in mice treated with ≥3 mg/kg of MFC-042 had smaller areas of necrosis, occasionally lacked a central area of necrosis and were often accompanied by mixed cell inflammation (≥10 mg/kg). Tumor emboli were not observed in the lung of mice administered MFC-042 at ≥10 mg/kg.

[0505] In Part B (FIG. 55B), the MTV of Group 1 (vehicle control) had reached 486 mm³ on Day 14, with individual tumor volumes ranging from 221 to 936 mm³. By comparison, treatment with 1 mg/kg ATRC-101 (Group 2) did not differ statistically from the vehicle control (p>0.05) with a MTV of 550 mm³, equivalent to −13% TGI. In contrast, higher doses of ATRC-101 (10 and 30 mg/kg) reduced MTVs to 256 mm³ (47% TGI) and 75 mm³ (85% TGI), respectively, and differed significantly from Group 1 (p<0.01 for 10 mg/kg and p<0.001 for 30 mg/kg). Notably, 30 mg/kg ATRC-101, where the highest measured serum concentration was 295 μg/mL, exceeded the 60% TGI threshold to indicate potential therapeutic activity. The lower potency of ATRC-101 compared to MFC-042 is expected given that ATRC-101 is a fully human antibody with a reduced affinity for mouse Fc gamma receptors. Microscopically, tumors in mice treated with 30 mg/kg of ATRC-101 had smaller areas of necrosis, occasionally lacked a central area of necrosis and had a lower mitotic rate. In addition, tumor emboli were not observed in the lung of mice treated with ATRC-101.

[0506] In summary, administration of MFC-042 (3 mg/kg, 10 mg/kg, and 30 mg/kg) or ATRC-101 (10 mg/kg and 30 mg/kg) significantly inhibited the growth of syngeneic EMT6 mammary carcinoma tumors in female BALB/c mice. All treatments were well-tolerated.

### Efficacy of ATRC-101 Variants in the Syngeneic Mouse Tumor Models

[0507] The anti-tumor efficacy of chimeric ATRC-101 variants was assessed in EMT6, CT26, and E0711 syngeneic tumor models, chosen based on their demonstrated responsiveness to checkpoint inhibitor therapy. These studies were performed using mouse chimeric variants, harboring a human Fv region expressed with a mouse Fc region to enable optimal interactions with mouse Fc gamma receptors in vivo.

Efficacy of ATRC-101 Variants Alone or in Combination with PD-1 Blockade in the EMT6 Syngeneic Mouse Tumor Model

[0508] Four studies were performed to assess the anti-tumor efficacy of mIgG2a chimeric variants of ATRC-101 in the EMT6 syngeneic mouse breast cancer model. In all three studies, BALB/c mice were inoculated subcutaneously with 1×10⁶ EMT6 mouse mammary carcinoma cells on Day 0 and test article administration was initiated when tumors were established. Statistical comparisons between tumor volumes from different treatment groups were conducted by Wilcoxon rank-sum test of the NAAC and the normalized growth rate metric (NGRM) parameters developed at Atreca, Inc.

[0509] In one study (Study EFF-010), the EMT6-BALB/c syngeneic mouse tumor model was used to evaluate the impact of Fc-effector function on anti-tumor efficacy following AIP-192482 isotype variant administration. The parental antibody AIP-192482 was expressed as an Fc-effector competent mIgG2a (AIP-192482-mIgG2a), an Fc-effector mutant non N-glycosylated mIgG2a (AIP-192482-mIgG2a-N297A), or mouse immunoglobulin G, subclass 1 (mIgG1; AIP-192482-mIgG1) or mouse immunoglobulin G, subclass 3 (mIgG3; AIP-192482-mIgG3) with weak Fc-effector function compared to mIgG2a.

[0510] In this study, administration of 10 mg/kg AIP-192482-mIgG2a led to significant anti-tumor efficacy compared to the vehicle control (p<0.0001 based on one-sided Wilcoxon rank-sum test of NAAC or NGRM) with complete tumor regression (CR) observed in 15 of 20 mice (FIG. 56). No significant anti-tumor efficacy was observed following administration of the AIP-192482-mIgG2a-N297A variant, while AIP-192482-mIgG1 and AIP-192482-mIgG3 displayed some anti-tumor activities (p<0.001 and p=0.01, respectively, based on Wilcoxon rank-sum test of NAAC). These results indicate that Fc-effector function is linked to and required for the anti-tumor activity of chimeric, parental AIP-192482 in the EMT6-BALB/c syngeneic mouse tumor model.

[0511] In another study (Study EFF-016), seven groups of mice with established subcutaneous EMT6 tumors (group mean tumor volume of 156 mm³) were randomized to treatment groups of 20 mice per group on Study Day 6. Mice were dosed IP with (i) 10 mg/kg of AIP-192482-mIgG2a, (ii) 5 mg/kg of AIP-192482-mIgG2a, (iii) 5 mg/kg of AIP-133645-mIgG2a, (iv) 2.5 mg/kg of AIP-133645-mIgG2a, (v) 5 mg/kg of AIP-160470 mIgG2a, or (vi) 2.5 mg/kg of AIP-160470-mIgG2a on Days 7, 10, 14, 17, 21, 24, and 27. Vehicle control animals were dosed with Dulbecco's PBS (DPBS).

[0512] Administration of AIP-192482-mIgG2a, AIP-133645-mIgG2a, or AIP-160470-mIgG2a led to a significant reduction in tumor volume at each tested dose level compared to the vehicle control group by metric NAAC and NGRM analyses (FIG. 57). At the dose of 5 mg/kg, both AIP-133645-mIgG2a and AIP-160470-mIgG2a had significantly greater anti-tumor efficacy than AIP-192482-mIgG2a (p<0.05 by NAAC and NGRM analysis for both comparisons. At 5 mg/kg, the largest effect size compared to vehicle control administration (indicative of anti-tumor effect) was observed for AIP-160470-mIgG2a.

[0513] Administration of AIP-192482 mIgG2a, AIP-133645-mIgG2a, or AIP-160470-mIgG2a at each dose level led to a significant survival benefit compared to vehicle administration (p<0.001 for all test articles and dose levels), with the median survival was delayed relative to the vehicle control group.

[0514] All mIgG2a chimeric ATRC-101 variants showed anti-tumor efficacy in this study, with the greatest effect size observed for AIP-160470-mIgG2a, the chimeric version of ATRC-101.

[0515] In Study EFF-004, the EMT6-BALB/c syngeneic mouse tumor model was used to evaluate the impact of 20 mg/kg AIP-192482-mIgG2a on tumor volume and survival when administered alone or in combination with 10 mg/kg anti-mouse PD-1 monoclonal antibody (clone RMP1-14, BioXCell). In this study, 20 mg/kg AIP-192482-mIgG2a showed significant anti-tumor activity when administered alone or in combination with anti-mouse PD-1 monoclonal antibody, while anti-mouse PD-1 monoclonal antibody did not show anti-tumor efficacy when administered as a monotherapy.

[0516] In this study, administration of AIP-192482-mIgG2a alone and AIP-192482-mIgG2a in combination with anti-mouse PD-1 monoclonal antibody lead to CR in 11 of 16 and 13 of 15 mice, respectively. Animals with CR were re-challenged on Day 51, 24 days after the last treatment. Of the 24 mice that had CR following administration of AIP-192482-mIgG2a alone or in combination with anti-mouse PD-1 monoclonal antibody, 20 remained tumor free post re-challenge, indicating that AIP-192482-mIgG2a can induce immunologic memory.

[0517] The impact of co-administration with anti-mouse PD-1 monoclonal antibody was further explored in study EFF-020. Female BALB/c mice with established subcutaneous EMT6 tumors were randomized to treatment groups of 20 mice per group on study Day 7, with a group mean tumor volume of approximately 104 mm³. Mice were dosed IP with vehicle (DPBS) or 2 dose levels each of AIP-192482-mIgG2a or AIP-160470-mIgG2a on Days 7, 11, 14, 18, 21, 25, 28. Mice were also dosed IP with 10 mg/kg anti-mouse PD-1 monoclonal antibody (clone RMP1-14, BioXCell) or vehicle (DPBS) on Days 7, 11, 14, 18.

[0518] In this study, monotherapy treatment groups showed a significant reduction in tumor growth compared to vehicle control group (p<0.01 for both NAAC and NGRM metric analyses for each comparison. Administration of 5 mg/kg or 10 mg/kg AIP-192482 mIgG2a in combination with anti-mouse PD-1 monoclonal antibody led to a significant reduction in tumor volumes compared to the vehicle control group, the anti-mouse PD-1 monotherapy group, and the respective AIP-192482-mIgG2a monotherapy group (p<0.05 by both NAAC and NGRM metric analysis for each comparison; (FIG. 58A). The number of CRs increased from 0 in the AIP-192482-mIgG2a monotherapy groups to 6 CRs and 4 CRs, respectively, at 5 mg/kg or 10 mg/kg AIP-192482-mIgG2a in combination with anti-mouse PD-1 monoclonal antibody.

[0519] In this study, administration of 2.5 mg/kg or 5 mg/kg AIP-160470-mIgG2a in combination with anti-mouse PD-1 monoclonal antibody led to a significant reduction in tumor volumes compared to the vehicle control group and the anti-mouse PD-1 monotherapy group (p<0.001 by both NAAC and NGRM metric analysis for each comparison; FIG. 58B). Tumor volumes were not significantly different between AIP-160470-mIgG2a administration in combination with anti-mouse PD-1 monoclonal antibody and AIP-160470-mIgG2a administration as a monotherapy at either dose level. However, the effect size and number of CR increased

### Efficacy of ATRC-101 Variants in the CT26-BALB/c Syngeneic Mouse Tumor Model

[0520] Two studies were performed, EFF-031 and EFF-039, to assess the anti-tumor efficacy of mIgG2a chimeric variants of ATRC-101 in the CT26-BALB/c syngeneic mouse tumor model. In both studies, BALB/c mice were inoculated subcutaneously with 1×10⁶ CT26 mouse colon carcinoma cell line and test article administration was initiated when tumors were established. Statistical comparisons between tumor volumes from different treatment groups were conducted by Wilcoxon rank-sum test of the NAAC and the NGRM parameters developed at Atreca, Inc.

[0521] In Study EFF-031, the CT26-BALB/c syngeneic mouse tumor model was used to evaluate the impact of (i) AIP-192482-mIgG2a, (ii) AIP-133645-mIg2a, or (iii) AIP-160470-mIgG2a, dosed IP at 20 mg/kg three times per week for 3 weeks, on tumor volume and survival. In this study, all three test articles showed significant anti-tumor efficacy and survival benefit compared to a vehicle control group dosed with DPBS.

[0522] In Study EFF-039, mice with established subcutaneous CT26 tumors (group mean tumor volume of approximately 145 mm³) were randomized to treatment groups on Study Day 9. Mice were dosed IP with 20 mg/kg AIP-192482-mIgG2a (40 mice) or vehicle (DPBS; 20 mice) on Days 9, 11, 13, 15, 18, 20, 22, 25, 27, and 29. Tumors in the vehicle control group showed rapid growth of tumor volumes FIG. 59A). Anti-tumor activity of AIP-192482-mIgG2a was significantly greater than in the vehicle control group (p=1.21×10⁻¹⁰ for NAAC and p=1.63×10⁻¹¹ for NGRM). Significant survival benefit was observed in the AIP-192482-mIgG2a treatment group compared to the vehicle control.

[0523] Animal dosed with AIP-192482-mIgG2a were observed through Day 97 to assess the durability of response. By Day 97, the group that had been administered AIP-192482-mIgG2a showed CR in 21 of 40 mice (FIG. 59B).

[0524] Animals with CR were inoculated with 1×10⁶ CT26 cells in the contralateral flank on Study Day 99, 70 days after the last AIP-192482-mIgG2a dose was administered. In parallel, 20 antibody-naïve, age-matched BALB/c mice were inoculated with 1×10⁶ CT26 cells on Study Day 99 as a control. No test article doses were administered in the re-challenge. Naïve BALB/c control mice inoculated with CT26 cells showed rapid tumor growth. In contrast, all 21 mice that had responded with a CR to the previous administration of AIP-192482-mIgG2a remained tumor free following re-challenge, indicating that AIP-192482-mIgG2a administration can produce a durable anti-tumor response and immunological memory in the CT26 syngeneic mouse tumor model following administration at either dose level of AIP-160470-mIgG2a in combination with anti-mouse PD-1 monoclonal antibody compared to the respective AIP-160470-mIgG2a monotherapy, from 4 CRs to 10 CRs at 2.5 mg/kg and from 4 CRs to 8 CRs at 5 mg/kg AIP-160470-mIgG2a.

[0525] Together, the data from these indicate that administration of ATRC-101 variants have anti-tumor activity in the CT26-BALB/c syngeneic mouse tumor model and that the activity is enhanced in combination with PD-1 blockade.

### Efficacy of ATRC-101 Variants in the CT26-BALBc Syngeneic Mouse Tumor Model

[0526] Two studies were performed, EFF-031 and EFF-039, to assess the anti-tumor efficacy of mIgG2a chimeric variants of ATRC-101 in the CT26-BALB/c syngeneic mouse tumor model. In both studies, BALB/c mice were inoculated subcutaneously with 1×10⁶ CT26 mouse colon carcinoma cell line and test article administration was initiated when tumors were established. Statistical comparisons between tumor volumes from different treatment groups were conducted by Wilcoxon rank-sum test of the NAAC and the NGRM parameters developed at Atreca, Inc.

[0527] In Study EFF-031, the CT26-BALB/c syngeneic mouse tumor model was used to evaluate the impact of (i) AIP-192482-mIgG2a, (ii) AIP-133645-mIg2a, or (iii) AIP-160470-mIgG2a, dosed IP at 20 mg/kg three times per week for 3 weeks, on tumor volume and survival. In this study, all three test articles showed significant anti-tumor efficacy and survival benefit compared to a vehicle control group dosed with DPBS.

[0528] In Study EFF-039, BALB/c mice with established subcutaneous CT26 tumors (group mean tumor volume of approximately 145 mm³) were randomized to treatment groups on Study Day 9. Mice were dosed IP with 20 mg/kg AIP-192482-mIgG2a (40 mice) or vehicle (DPBS; 20 mice) on Days 9, 11, 13, 15, 18, 20, 22, 25, 27, and 29. Tumors in the vehicle control group showed rapid growth of tumor volumes (FIG. 59A). Anti-tumor activity of AIP-192482-mIgG2a was significantly greater than in the vehicle control group (p=1.21×10⁻¹⁰ for NAAC and p=1.63×10⁻¹¹ for NGRM). Significant survival benefit was observed in the AIP-192482-mIgG2a treatment group compared to the vehicle control.

[0529] Animal dosed with AIP-192482-mIgG2a were observed through Day 97 to assess the durability of response. By Day 97, the group that had been administered AIP-192482-mIgG2a showed CR in 21 of 40 mice (FIG. 59B).

[0530] Animals with CR were inoculated with 1×10⁶ CT26 cells in the contralateral flank on Study Day 99, 70 days after the last AIP-192482-mIgG2a dose was administered. In parallel, 20 antibody-naïve, age-matched BALB/c mice were inoculated with 1×10⁶ CT26 cells on Study Day 99 as a control. No test article doses were administered in the re-challenge. Naïve BALB/c control mice inoculated with CT26 cells showed rapid tumor growth. In contrast, all 21 mice that had responded with a CR to the previous administration of AIP-192482-mIgG2a remained tumor free following re-challenge, indicating that AIP-192482-mIgG2a administration can produce a durable anti-tumor response and immunological memory in the CT26-BALB/c syngeneic mouse tumor model.

Efficacy of ATRC-101 Variant AIP-192482-mIgG2a Alone and in Combination with PD-1 Blockade in E0771 Syngeneic Mouse Tumor Models

[0531] The E0771-057BL/6 syngeneic mouse tumor model was used to evaluate the impact of administration of AIP-192482-mIgG2a, on tumor volumes when administered alone or in combination with an anti-mouse PD-1 monoclonal antibody (clone RMP1-14, BioXCell), in study EFF-006. C57BL/6 mice were inoculated subcutaneously with 1×10⁶ cell of the E0771 mouse medullary breast adenocarcinoma cell line. Four groups of female mice with established subcutaneous E0771 tumors were randomized to treatment groups of 20 mice per group on study Day 8, with mean tumor volume of approximately 104 mm³ in each group. Mice were dosed IP with 20 mg/kg AIP-192482-mIgG2a or vehicle (DPBS) on Days 9, 13, 16, 20, 23, 27, and 30. Mice were also dosed IP with 2.5 mg/kg anti-mouse PD-1 monoclonal antibody or vehicle (DPBS) on Days 9, 13, 16, and 20. Statistical comparisons between tumor volumes from different treatment groups were made by Wilcoxon rank-sum test of the NAAC and the NGRM parameters developed at Atreca, Inc.

[0532] In this study, administration of AIP-192482-mIgG2a or anti-mouse PD-1 monoclonal antibody alone led to delayed growth of tumor volumes in some animals but did not lead to a significant reduction in tumor volume compared to the vehicle control (FIG. 60). Administration of AIP-192482-mIgG2a in combination with anti-mouse PD-1 monoclonal antibody led to a significant reduction in tumor volumes compared to the vehicle administration (p=0.0176 for NAAC and p=0.0007 for NGRM), administration of anti-mouse PD-1 alone (p=0.0455 for NAAC and p=0.00194 for NGRM), and administration of AIP-192482-mIgG2a alone (p=0.0262 for NGRM).

[0533] These results indicate that administration of an ATRC-101 variant in combination with anti-mouse PD-1 monoclonal antibody increases anti-tumor efficacy compared to the respective monotherapies in the E0771-057BL/6 syngeneic mouse tumor model.

### Impact of Host T Cells on Anti-Tumor Efficacy of AIP-192482-mIgG2a in the EMT6-BALB/c Syngeneic Mouse Tumor Model

[0534] EMT6-BALB/c syngeneic mouse tumor models were used to assess the potential contribution of T cells to anti-tumor efficacy of the parental antibody AIP-192482-mIgG2a, which has anti-tumor activity in the EMT6-BALB/c mouse syngeneic tumor model.

[0535] In Study TMD04, anti-tumor efficacy of AIP-192482-mIgG2a was assessed in the presence or absence of an anti-mouse CD8a antibody, which depletes mouse CD8+ T cells. To assess anti-tumor efficacy, BALB/c mice were inoculated subcutaneously with EMT6 cells. Once tumors were established mice were dosed twice weekly with (i) the T cell-depleting anti-mouse CD8α antibody or vehicle (DPBS) and (ii) AIP-192482-mIgG2a or vehicle control (DPBS). In this study, administration of AIP-192482-mIgG2a led to a significant reduction in tumor growth in the absence of anti-mouse CD8α depleting antibody (p<0.0001 for comparison of both NAAC and NGRM; FIG. 61). When anti-mouse CD8α antibody was administered, anti-tumor efficacy of AIP-192482-mIgG2 was abrogated.

[0536] In Study EMT6-ATRC-e002, anti-tumor efficacy of AIP-192482-mIgG2a was assessed in EMT6 tumor-bearing BALB/c nude mice (BALB/c^{nu/nu} (CAnN.Cg-Foxn1^{nu}/Crl)), which lack T cells. BALB/c nude mice were inoculated subcutaneously with EMT6 cells. Starting 7 days post tumor inoculation (group mean tumor volumes between 80 mm³ and 150 mm³), mice were dosed three times weekly with (i) 10 mg/kg AIP-192482-mIgG2a, (ii) 20 mg/kg of AIP-192482-mIgG2a, or (iii) vehicle control (DPBS). Animals in all three treatment groups showed rapid progression of tumor volumes through Study Day 25, with no impact of AIP-192482-mIgG2a administration on tumor volumes.

[0537] Together, the data from both experiments indicate that T cells, most likely CD8+ T cells, are required for anti-tumor activity of AIP-192482-mIgG2a in mouse models.

### Impact of AIP-192482-mIgG2a on the Tumor Microenvironment in the EMT6-BALB/c Syngeneic Mouse Tumor Model

[0538] The impact of administration of the parental antibody AIP-192482-mIgG2a, on the TME was assessed in the EMT6-BALB/c syngeneic mouse tumor model in which AIP-192482-mIgG2a has anti-tumor activity.

[0539] As part of study EFF-004, TME was assessed by immunofluorescence in tumors harvested from mice dosed IP with 20 mg/kg AIP-192482-mIgG2a or vehicle (DPBS) on Days 7, 10, 14, 18, and 21. On Day 15, after administration of 3 doses of AIP-192482-mIgG2a or vehicle, the proportion of CD8+ T cells in tumors from mice dosed with AIP-192482-mIgG2a was significantly higher than in tumors from mice dosed with vehicle (p<0.05 by Fisher's Least Significant Difference test; (FIG. 62). Similarly, the proportion of iNOS (inducible nitric oxide synthase) positive, pro-inflammatory M1-polarized macrophages in tumors from mice dosed with AIP-192482-mIgG2a was significantly higher on Day 15 than in tumors from mice dosed with vehicle (p<0.01 by unpaired t-test; (FIG. 62).

[0540] On Day 22, after administration of 5 doses of AIP-192482-mIgG2a or vehicle, the proportion of CD4+FoxP3+ regulatory T cells (Treg) in tumors from mice dosed with AIP-192482-mIgG2a was significantly lower than in tumors harvested from mice that had been dosed with vehicle.

[0541] As part of one study (Study TMD04), in which BALB/c mice with established EMT6 tumors were dosed IP twice weekly with 10 mg/kg AIP-192482-mIgG2a or vehicle. In this study, most mice dosed with AIP-192482-mIgG2a were euthanized at study termination on Day 26 and most vehicle treatment mice were euthanized when they reach a tumor volume ≥2000 mm³ between Days 25 and 27. Tumors were harvested after euthanasia and dissociated, and the resulting cell preparations were stained to evaluate the presence of lymphoid and myeloid subsets within the tumor by flow cytometry.

[0542] A significant increase was observed in the proportions of CD8+ T cells, CD4+ T cells, natural killer (NK) cells, dendritic cells, Treg, and monocytic myeloid-derived suppressor cells (M-MDSC) between tumors from mice dosed with AIP-192482-mIgG2a compared to tumors from mice dosed with vehicle. Conversely, F4/80+ macrophages and granulocytic myeloid-derived suppressor cell (G-MDSC) populations were reduced, each showing greater than 10-fold reductions in tumors from mice dosed with AIP-192482-mIgG2a compared to tumors from mice dosed with vehicle.

[0543] Together, the cell types identified by immunofluorescence on tissue specimens and by flow cytometry of cellular suspensions indicate that binding of the ATRC-101 target results in a change in the proportion and nature of lymphoid and myeloid cell populations in the TME from those predominantly associated with pro-tumorigenic and immune-suppressive properties towards those that are more closely associated with anti-tumorigenic, pro-inflammatory properties.

### Secondary Pharmacodynamics

[0544] The specificity and selectivity of ATRC-101 were assessed using an arrayed cell expression screening system (Retrogenix, Whaley Bridge, High Peak, UK). Arrayed cell expression screening systems have been used for specificity assessments and target identification. The parental antibody AIP-192482, expressed as a human IgG1 (AIP-192482-hIgG1) evaluated in this study did not show background binding to the HEK293 cells used.

[0545] AIP-192482-hIgG1 was screened at a concentration of 2 μg/mL on arrayed fixed HEK293 cells each expressing one of the 3559 full-length human plasma membrane proteins. Duplicate arrays were probed in a primary screen as well as in a confirmatory/specificity screen. No specific binding of AIP-192482-hIgG1 to any of the expressed proteins was observed. The results indicate ATRC-101 does not bind specifically or selectively to any of the 3559 human plasma membrane proteins that constitute the library as tested.

### Safety Pharmacology

[0546] ATRC-101 is a monoclonal antibody with a selective mechanism aimed to treat cancer patients and does not belong to a drug or chemical class expected to cause cardiovascular effects. As detailed in ICH guidelines S6 (R1), S7A, and S9, specific safety pharmacology studies are not required for biotechnology-derived products that achieve specific receptor targeting, such as monoclonal antibodies for anti-cancer pharmaceuticals.

[0547] Further, the mouse and cynomolgus monkey are not appropriate species for safety pharmacology or toxicology studies due to no, or very low, ATRC-101 target expression in normal tissues. Nevertheless, a 4-week exploratory intravenous toxicity study was conducted in cynomolgus monkeys and no non-target effects were observed (as evaluated by routine clinical observations, clinical pathology, cytokines, gross and microscopic evaluations) at ATRC-101 doses≤100 mg/kg (AUC range of 185000 to 186000 hr·μg/mL). There were also no target-related adverse effects observed (as evaluated by routine clinical observations, clinical pathology, cytokines, gross and microscopic evaluations) in an EMT6-BALB/c syngeneic tumor model at dose levels of ATRC-101 and MFC-042≤30 mg/kg (the highest serum concentration of 295 μg/mL and 290 μg/mL in tumor-bearing mice, respectively).

[0548] Based on immunoprecipitation and mass spectroscopy data, ATRC-101 recognizes a target that is a complex containing human polyadenylate-binding protein family member(s) and poly(A) RNA. ATRC-101 binds with nanomolar affinity to in vitro reconstituted complexes containing in vitro transcribed poly(A) RNA and (i) recombinant human/non-human primate PABPC-1 or (ii) recombinant mouse PABPC-1.

[0549] While PABPC-1 and poly(A) RNA are widely present in normal cells, the ATRC-101 target appears to be tumor-associated. Tumor-selective binding to ATRC-101 target was observed in a variety of human tumor types including NSCLC, breast cancer, CRC, ovarian cancer, and melanoma, where tumor cores were positive, but adjacent tissues were not. Similarly, the target of ATRC-101 is detected in mouse EMT6 tumor cores, but not adjacent tissues. Binding to mouse EMT6 tumor cells extracted from tumor cores is lost over time when these cells are cultured in vitro. In addition, binding to ATRC-101 target in human tumor cores was shown to be dependent on the RNase-sensitive component of the complex.

[0550] In normal human tissues, normal cynomolgus monkey tissues, and most normal mouse tissues, pharmacology assessments revealed no definitive ATRC-101 target binding. In a GLP tissue cross-reactivity study in normal human tissues, staining with ATRC-101 was observed in some human tissues. However, virtually all of the staining detected was cytoplasmic in nature with the singular exception of rare and sparse staining noted in the distal tubular epithelial cells of the human kidney. The findings are not considered to be toxicologically relevant.

[0551] Overall, the pharmacology and toxicology assessments indicate that the target of ATRC-101 is tumor-associated and that cell-surface localization is dependent on the context of tumor growth in vivo. The basis of the tumor-association of the ATRC-101 target and selectivity of ATRC-101 remain under study.

[0552] ATRC-101 and chimeric ATRC-101 variants show anti-tumor activity across EMT6, CT26, and E0771 syngeneic mouse tumor models, with no signs of toxicity. ATRC-101 variants show increased anti-tumor activity in combination with PD-1 blockade. Anti-tumor activity of ATRC-101 variants is dependent on Fc effector function and the presence of host T cells and is associated with anti-tumorigenic, pro-inflammatory changes in the TME. ATRC-101 does not appear to act through either ADCC or CDC mechanisms. ATRC-101 does not bind to human PBMCs in vitro and does not appear to cause cytokine release in PBMC and whole blood in vitro assays.

[0553] Based on these in vivo and in vitro observations, the clinical candidate ATRC-101 is proposed to cause tumor growth inhibition and regression, in part, by (a) altering the composition of the tumor microenvironment to be more anti-tumorigenic and pro-inflammatory, and (b) inducing an adaptive immune response that recruits effector CD8+ T cells to attack the tumors.

[0554] Based on the tumor-selective binding in human carcinomas and melanoma and anti-tumor activity in mouse models, ATRC-101 is selected for administration to a patient for treatment of advanced solid tumors.

### Example 14. Toxicology

[0555] The nonclinical safety studies of ATRC-101 consisted of in vitro assessments of ATRC-101 utilizing human cells and tissues and in vivo animal studies in a mouse disease model to assess potential target related toxicity and in cynomolgus monkeys to address potential target-related toxicity and off-target toxicity, respectively. This nonclinical safety strategy is consistent with the recommendations detailed in ICH S6 (R1) as well as ICH S9 and is considered appropriate for evaluating the safety profile of ATRC-101. The scope of the toxicologic evaluation was appropriate to support its proposed clinical use for treatment of cancer.

[0556] The scope of the toxicologic evaluation of ATRC-101 demonstrated an acceptable safety profile and supports first-in-human dosing in cancer patients. The proposed human starting dose is 0.3 mg/kg, which is 8-fold lower than the NOAEL (30 mg/kg; human equivalent dose (HED)=2.4 mg/kg) in the EMT6 syngeneic breast cancer study and is expected to provide an adequate safety margin for the starting clinical dose.

[0557] The human tissue cross-reactivity study was conducted in compliance with GLP regulations. Non-GLP studies were conducted in accordance with the International Conference on Harmonization (ICH) guidelines using good scientific practices and following the applicable standard operation procedures (SOPs) of the Testing Facility and applicable Sites.

### Single-Dose Toxicity

[0558] A single-dose toxicity study was not conducted. However, a single-dose IV bolus pharmacokinetic (PK) and tolerability study with a 4-week observation period was conducted in cynomolgus monkeys. In this study, administration of ATRC-101 was well tolerated in cynomolgus monkeys at dose levels up to 30 mg/kg.

### Repeat-Dose Toxicity

[0559] Considering the ATRC-101 target is tumor-associated with no or very low expression in normal animal tissues, the potential target related toxicity of ATRC-101 was evaluated in a repeat-dose EMT6-BALB/c syngeneic breast cancer model. In addition, a non-GLP repeat-dose toxicity study in cynomolgus monkeys was conducted to evaluate the potential non-target related toxicity of ATRC-101.

### Preclinical Efficacy and Safety Assessments of ATRC-101 and MFC-042 in Syngeneic EMT6 Breast Cancer Model (Studies ATRC-101.PD.18.01 and ATRC-101.PD.18.02)

[0560] Safety parameters were incorporated in this preclinical efficacy and safety assessments study in the mouse EMT6-BALB/c syngeneic breast cancer model to evaluate the potential target-related toxicity of ATRC-101 and MFC-042 (harboring an identical human Fv region of ATRC-101 but expressed with a mouse IgG2a Fc region). This study was composed of two parts that were conducted concurrently: assessment of MFC-042 (Part A; ATRC-101.PD.18.01) and ATRC-101 (Part B; ATRC-101.PD.18.02).

[0561] In Part A of the study, seven groups of female BALB/c mice (15 animals/group) with established subcutaneous EMT6 tumors (group mean tumor volumes (MTVs)=112 to 113 mm³) were dosed via IP injection with 0 (vehicle), 0.1, 0.3, 1, 3, 10, or 30 mg/kg MFC-042 on Days 1, 4, 8, 11, and 15. Two groups of non-tumor bearing (naïve) mice (15 animals/group) were treated with vehicle or 30 mg/kg MFC-042 at the same dose regimen. Animals were euthanized for necropsy examinations on Day 16.

[0562] In Part B of the study, four groups of female BALB/c mice (15 animals/group) with established subcutaneous EMT6 tumors (group MTV=108 mm³) were dosed via IP injection with 0 (vehicle), 3, 10, or 30 mg/kg ATRC-101 on Days 1, 4, 8, 11, and 15. Two groups of naïve mice (15 animals/group) were treated with vehicle or 30 mg/kg ATRC-101 at the same dose regimen. Animals were euthanized for necropsy examinations on Day 16.

[0563] The parameters evaluated in this study included mortality/moribundity, clinical signs, body weights, overall efficacy assessments, clinical pathology (hematology and clinical chemistry), serum test article concentrations, serum cytokine analysis, gross necropsy findings, organ weights, and microscopic examinations (the brain, heart, lung, liver, kidney, pancreas, spleen, stomach, and lymph nodes, as well as tumor tissue in tumor-bearing animals).

[0564] Repeat doses of ATRC-101 at ≥10 mg/kg or MFC-042 at ≥3 mg/kg to tumor-bearing mice significantly inhibited the growth of EMT6-BALB/c syngeneic mammary tumors. In these groups, tumor growth inhibition, often with evidence of tumor regression, met or exceeded the threshold for potential therapeutic activity.

[0565] There was no ATRC-101 or MFC-042-related mortality in the study. There were no adverse clinical observations or effects on body weight related to ATRC-101 or MFC-042. No toxicologically significant effects were noted in hematology and clinical chemistry parameters. There were no gross pathology observations or notable changes in organ weights in mice euthanized on Day 16.

[0566] The cytokine levels and trends noted following the administration of ATRC-101 and MFC-042 were within the expected biologic response from the administration of human proteins to a mouse tumor model, and/or were related to anti-tumor activity of test articles and, therefore, were not considered adverse.

[0567] Microscopically, tumor masses collected at necropsy were composed of neoplastic cells arranged in streams and bundles. Overall, tumor masses were observed in all mice inoculated with EMT6 tumor cells. There were no ATRC-101 or MFC-042-related adverse microscopic findings at terminal euthanasia.

[0568] Repeat-dose IP administration of ATRC-101 at dose levels of 0, 1, 10, and 30 mg/kg or MFC-042 at dose levels of 0, 0.1, 0.3, 1, 3, 10, and 30 mg/kg, to naïve and EMT6 syngeneic breast cancer tumor-bearing female BALB/c mice was well-tolerated and no toxicologically significant effects were noted. Based on these safety assessment results, the NOAEL was considered to be 30 mg/kg for ATRC-101 and MFC-042 in naïve and EMT6 syngeneic breast cancer tumor-bearing female BALB/c mice. At this dose level, the highest serum concentrations of ATRC-101 were 295 μg/mL and 281 μg/mL in tumor-bearing mice and naïve mice, respectively; the highest serum concentrations of MFC-042 were 367 μg/mL and 533 μg/mL in tumor-bearing mice and naïve mice, respectively.

A 4-Week Dose Range-Finding Toxicology Study with ATRC-101 in Cynomolgus Monkeys (ATRC-101. TX 18.01)

[0569] The objective of this study was to determine the potential non-target related toxicity and toxicokinetics (TK) of ATRC-101 when administered by IV infusion (30 minutes in duration) once weekly for 4 weeks (Days 1, 8, 15, and 22) to cynomolgus monkeys. In the study, 8 naïve monkeys were randomly assigned to 4 groups (1 animal/sex/group). Animals were dosed once weekly with 0 (vehicle), 10, 30, or 100 mg/kg ATRC-101 via 30-minute IV infusion for 4 weeks (4 doses). The dose volume was 5 mL/kg.

[0570] The following parameters were evaluated in this study: mortality/moribundity, clinical signs, qualitative food consumption, body weights, clinical pathology (hematology, clinical chemistry, and urinalysis), cytokines, TK parameters, organ weights, macroscopic and microscopic examinations (20 organs/tissues, including the brain, heart, lung, liver, kidney, and pancreas).

[0571] In the TK evaluation, Cₘₐₓ was generally observed at 0.75 hours (Tₘₐₓ) post the start of infusion (0.25 hours post the end of infusion). The terminal elimination phase was not characterized for any animals due to the relatively sustained concentrations observed after Tₘₐₓ. Systemic exposure increased with dose within the range tested. Though there was 1 animal/sex/group, the increase seemed to be approximately dose proportional. There was no notable gender-related difference in exposure. Following repeated administration, systemic exposure on Day 22 was generally higher compared to Day 1, with individual accumulation ratios ranging from 1.64 to 2.17.

[0572] Intravenous administration of ATRC-101 once weekly to cynomolgus monkeys for 4 weeks at doses of 0, 10, 30, or 100 mg/kg/week was well tolerated. All animals survived until terminal necropsy (Day 29). There were no ATRC-101-related changes in clinical signs, qualitative food consumption, body weights, clinical pathology parameters, or most cytokines. There were no ATRC-101-related gross pathology findings, definitive organ weight findings, or microscopic findings.

[0573] Administration of ATRC-101 by IV infusion once weekly for 4 weeks was well tolerated in cynomolgus monkeys at all dose levels administered: 10, 30, and 100 mg/kg/week. The NOAEL was considered to be 100 mg/kg/week, with associated Cₘₐₓ values of 2410 μg/mL for males and 2690 μg/mL for females, and AUC₀₋ₜ values of 185000 μg·hr/mL for males and 186000 μg·hr/mL for females on Day 22.

### Local Tolerance

[0574] The local tolerance of ATRC-101 was assessed in the non-GLP 4-week repeat-dose toxicity study in cynomolgus monkeys (ATRC-101.TX.18.01). There was no clinical evidence of irritation or local tolerance issues at the ATRC-101 injection sites after repeat dosing (IV, once every week for 4 doses total) at doses up to 100 mg/kg with an ATRC-101 concentration of 20 mg/mL.

### Other Toxicity Studies

### Tissue Cross-Reactivity Study of ATRC-101 in Normal Human Tissues (ATRC-101.TX 19.01)

[0575] A GLP tissue cross-reactivity study in normal human tissues was conducted to evaluate potential cross-reactivity of ATRC-101 (2 and 10 μg/mL) with cryosections from a comprehensive panel of 34 normal human tissues (3 donors per tissue).

[0576] ATRC-101 produced weak to strong cytoplasm and cytoplasmic granule staining of rare positive control neoplastic cells in human mammary tumor 016327T2 at both concentrations. ATRC-101 did not specifically react with the negative control stromal fibroblasts in human mammary tumor 016327T2 at either staining concentration. The control article, human IgG1, did not specifically react with either the positive or negative control tissue elements. There also was no staining of the assay control slides. The specific reactions of ATRC-101 in all staining runs with the positive control material and the lack of specific reactivity with the negative control material, as well as the lack of reactivity of the control article, indicated that the assay was sensitive, specific, and reproducible.

[0577] Membrane and cytoplasmic staining with ATRC-101 were observed in tubular epithelium (weak-strong, rare) in the kidney. Cytoplastic staining was noted in epithelium (weak-strong, variably frequent) in the Fallopian tube (mucosa), pancreas (ducts, acini), salivary gland (acini), thyroid (follicles, parafollicular cells), and uterus (endometrium); mononuclear cells (weak-moderate, rare) in the small intestine; myoepithelium (weak-moderate, rare-occasional) in the breast; islet cells (weak-moderate, very rare) in the pancreas; neurons (weak-intense, rare-occasional) in the brain (cerebellum, cerebrum) and spinal cord; retinal cells (weak-strong, occasional) in the outer plexiform layer in the eye; cells/processes associated with peripheral nerves (weak-strong, very rare-occasional) in the bladder, breast, eye, gastrointestinal tract (esophagus, small intestine [ganglion cells]), skin, spinal cord (spinal nerve roots), striated (skeletal) muscle; pituicytes (weak-moderate, frequent) in the pituitary neurohypophysis. The subcellular localization of the neuropil staining (weak-moderate, frequent) in the human brain (cerebellum, cerebrum) could not be identified at the resolution of a light microscope.

[0578] In summary, staining with ATRC-101 was observed in some human tissues. However, virtually all of the staining with ATRC-101 was cytoplasmic in nature, and monoclonal antibody binding to cytoplasmic sites in tissue cross-reactivity studies generally is considered of little to no toxicologic significance due to the limited ability of antibody drugs to access the cytoplasmic compartment in vivo (Hall et al, 2008; Leach et al, 2010). Membrane staining with ATRC-101 was restricted to rare (1-5% of cells) tubular epithelial cells in the human kidney. Therefore, this staining is not anticipated to be toxicologically significant. The subcellular localization of the neuropil staining in the human brain could not be identified at the resolution of a light microscope; however, this staining is not anticipated to be toxicologically significant as this tissue element is protected by the blood-brain barrier.

### Nonclinical Toxicology Findings

[0579] ATRC-101 binds to a tumor-associated version of a complex containing a polyadenylate-binding protein family member and poly(A) RNA. This antibody is considered to pose a low risk of triggering cytokine release in humans based on in vitro human PBMC binding and cytokine release study results. A comprehensive battery of non-clinical toxicity studies was performed to establish the toxicologic profile of ATRC-101.

[0580] The potential target-related toxicity of ATRC-101 was evaluated in a preclinical efficacy and safety study in the syngeneic EMT6-BALB/c breast cancer mouse model. In this study, administration of ATRC-101 at dose levels of 0, 1, 10 and 30 mg/kg or MFC-042 (identical human Fv region of ATRC-101 on a mouse IgG2a Fc region) at dose levels of 0, 0.1, 0.3, 1, 3, 10 and 30 mg/kg, to naïve and EMT6-BALB/c syngeneic breast cancer tumor-bearing mice was well-tolerated and no toxicologically significant effects were noted. The NOAEL was considered to be 30 mg/kg for ATRC-101 and MFC-042 in naïve and tumor-bearing female BALB/c mice. At this dose level, the highest serum concentrations of ATRC-101 were 295 μg/mL and 281 μg/mL in tumor-bearing mice and naïve mice, respectively; the highest serum concentrations of MFC-042 were 367 μg/mL and 533 μg/mL in tumor-bearing mice and naïve mice, respectively.

[0581] The potential non-target-related toxicity of ATRC-101 was evaluated in a 4-week repeat-dose toxicity study in cynomolgus monkeys. Administration of ATRC-101 by IV infusion once weekly for 4 weeks was well tolerated in cynomolgus monkeys at all dose levels administered: 10, 30, and 100 mg/kg/week. The NOAEL was considered to be 100 mg/kg/week, with Cₘₐₓ values of 2410 μg/mL for males and 2690 μg/mL for females, and AUC₀₋ₜ values of 185000 μg·hr/mL/mL for males and 186000 μg·hr/mL for females on Day 22.

[0582] In a GLP tissue cross-reactivity study in normal human tissues, staining with ATRC-101 was observed in some human tissues. However, virtually all of the staining was cytoplasmic in nature and is not a toxicological concern because it is unlikely that ATRC-101 will cross cell membranes or interact directly with components of the cytoplasm. Membrane associated staining with ATRC-101 was restricted to rare (1-5% of cells) tubular epithelial cells in the human kidney. Given the rarity of staining frequency, this staining is not anticipated to be toxicologically significant. Furthermore, ATRC-101 (i) does not appear to mediate either ADCC or CDC, (ii) binding of ATRC-101 to its target was not found to trigger or abrogate any signal transduction pathways, (iii) and any potential renal toxicity will be monitored by urinalysis and clinical chemistry in the proposed clinical trial. Taken together the membrane staining noted on rare tubular epithelial cells in the in vitro tissue cross-reactivity study is considered to be a low risk for patient safety.

[0583] Collectively, the results of the non-clinical toxicology studies demonstrate an acceptable safety profile and support progression of ATRC-101 into clinical studies in cancer patients.

### Human Dose Rationale

[0584] The scientific rationale for choosing the human starting dose of 0.3 mg/kg is based on an integrated evaluation of all available ATRC-101 nonclinical pharmacology, PK, and toxicology data, as well as the available literature. At the proposed human starting dose of 0.3 mg/kg the Cₘₐₓ is expected to be approximately 7.81 μg/mL and the AUC₀₋₆₇₂ₕ is expected to be 53.1 day·μg/mL based on ATRC-101 human dose simulations.

[0585] The proposed 0.3 mg/kg starting dose provides a substantial safety margin from the NOAEL dose of 30 mg/kg determined in the repeat-dose preclinical efficacy and safety study in EMT6 breast cancer tumor-bearing female BALB/c mice. The human starting dose of 0.3 mg/kg is ⅛ of the NOAEL (30 mg/kg in mice=2.44 mg/kg human equivalent dose). This provides a safety margin of approximately 47-fold to the expected Cₘₐₓ (7.81 μg/mL) in human at the proposed starting dose of 0.3 mg/kg.

### Example 15. Pharmacokinetics

[0586] In the single-dose PK study, 6 naïve cynomolgus monkeys (3 males and 3 females) were randomly assigned to 3 dose groups and administered ATRC-101 at 1, 10, or 30 mg/kg via intravenous (IV) bolus injection. Animals were observed for 28 days following the administration of ATRC-101. Serum samples were collected at different timepoints and analysed by an Enzyme-Linked Immunosorbent Assay (ELISA) method for the determination of ATRC-101 concentration.

[0587] Following a single IV administration, maximum serum concentrations (Cₘₐₓ) were observed between 0.083 and 1 hour post-dose except for the female at 1 mg/kg where it was observed at 8 hour post-dose. Half-lives (T_{1/2}) ranged from 177 to 225 hours. The apparent clearance rate (CL) and the apparent volume of distribution (Vd) ranged between 0.159 and 0.436 mL/hr/kg and between 51.4 and 117 mL/kg, respectively. Systemic exposure increased with dose within the range tested. The increase was approximately dose proportional except for the females between 1 and 10 mg/kg where the increase was lower than dose proportional. There was no notable gender-related difference in exposure except at 1 mg/kg where female exposure was 2-fold higher compared to that of male.

[0588] The toxicokinetic (TK) profile of ATRC-101 was evaluated in a 4-week repeat-dose IV toxicity study in cynomolgus monkeys. Eight (8) naïve animals (4 males and 4 females) were given once weekly IV infusion (30 minutes) of ATRC-101 at 0, 10, 30, or 100 mg/kg for a total of 4 doses. Serum samples were collected at different timepoints and analysed by an ELISA method. Maximum serum concentrations was generally observed at 0.75 hours post the start of infusion (SOI). The terminal elimination phase was not characterized for any animals due to the relatively sustained concentrations observed after the time of Cₘₐₓ (Tₘₐₓ). Systemic exposure increased with dose within the range tested and the increase was approximately dose proportional. There was no notable gender-related difference in exposure. Following repeated administration, systemic exposure on Day 22 was generally higher compared to Day 1, with individual accumulation ratios ranging from 1.64 to 2.17.

### LC-MS/MS Method for Measuring ATRC-101 Concentration in BALB/c Mouse Serum (ATRC-101.PD. 18.02)

[0589] ATRC-101 concentration in BALB/c mouse serum was determined using a liquid chromatography-tandem mass spectrometry (LC-MS/MS) method. In the method, PEP-1, a signature peptide digested from ATRC-101, was measured to determine the concentration of ATRC-101 (the concentration of PEP-1 is equivalent to that of ATRC-101). In this assay, each 10 μL aliquot of standard, quality control (QC) sample, or study sample was mixed with 25 μL of working internal standard solution (25 μg/mL in water), 15 μL of water, and 150 μL of SMART Digestion buffer (Thermo Fisher Scientific, Waltham, Mass., USA). The samples were briefly centrifuged and a 200 μL aliquot of the resulting supernatant was transferred to SMART Digestion microtubes. The samples were vortexed and incubated at 65° C. while shaking for 2 hours. A 200 μL aliquot of reaction mixture was mixed with 5 μL of 20% sodium bisulfite. The reaction was quenched with 5 μL of neat formic acid. Samples were vortexed and centrifuged. A 150 μL aliquot of the resulting supernatant was transferred to a clean 96-well low-binding plate. An aliquot was injected onto an LC-MS/MS system for analysis. The liquid chromatography system used a Phenomenex XB-C18 column, 1.0×50 mm (2.7 μm particle size) with a gradient flow consisting of water/formic acid (100/0.5, v/v) and acetonitrile/formic acid (100/0.5, v/v) at a flow rate of 0.600 mL/minute. The signature peptide and internal standard were detected using a Waters Xevo TQ-S triple quadrupole LC-MS/MS system equipped with an ESI (TurboIonSpray®) ionization source operated in the positive ion mode. This method was applicable to quantitation within nominal concentration ranges of 2 to 250 μg/mL for ATRC-101 from a 10-μL BALB/c mouse serum aliquot.

### ELISA Method for Measuring ATRC-101 Concentration in Cynomolgus Monkey Serum (ATRC-101.PK.18.01)

[0590] ATRC-101 concentration in cynomolgus monkey serum was determined using an ELISA method. This assay employed a quantitative immunoassay technique. Briefly, microtiter plates were coated with sheep anti-human IgG to capture ATRC-101. The assay was calibrated using a standard curve generated from eleven standards within range prepared using the human antibody, ATRC-101 at concentrations of 800, 400, 300, 200, 150, 100, 75, 50, 30, 20, 10 ng/mL, including anchor points at 10 and 800 ng/mL, in neat cynomolgus monkey serum. The QC samples were prepared in serum at a concentration of 250, 175, and 40 ng/mL of ATRC-101 in neat cynomolgus monkey serum. The data regression from the microplate reader was performed using Watson LIMS, version 7.3.0.01. A 4-parameter model was used to fit the sigmoid calibration curve, with a weighting equation of 1/y². Standards, QC samples, and study samples were analyzed with an minimum required dilution of 5-fold and sample concentrations in neat monkey serum (μg/mL) were determined. One set of QC samples was prepared before and after preparation of standards, test samples, and blank. Detection of ATRC-101 was accomplished with goat anti-human IgG (heavy and light chains) conjugated to horse radish peroxidase. Tetramethylbenzidine was used as the chromogenic substrate. The range of quantification of the method was 20-400 ng/Ml.

[0591] The absorption of ATRC-101 was characterized in a single-dose IV bolus PK study and a repeat-dose IV infusion toxicity study in cynomolgus monkeys. Monkey serum concentration of ATRC-101 was determined by an ELISA method.

[0592] In the single-dose pharmacokinetic study, 6 naïve cynomolgus monkeys (3 males and 3 females) were randomly assigned to 3 dose groups and administered ATRC-101 at 1, 10, or 30 mg/kg via IV bolus injection. Tₘₐₓ was generally observed between 0.083 and 1 hour post-dose. T_{1/2} ranged from 177 to 225 hours. CL and Vd ranged between 0.15 and 0.436 mL/hr/kg and 51.4 and 117 mL/kg, respectively. Systemic exposure to ATRC-101 increased with dose within the range tested and the increase was approximately dose proportional.

[0593] In the 4-week repeat-dose IV toxicokinetic study in cynomolgus monkeys, 8 naïve animals (4 males and 4 females) were randomly assigned to 4 dose groups and given once weekly IV infusion (30 minutes) of ATRC-101 at 0, 10, 30, or 100 mg/kg for a total of 4 doses. Tₘₐₓ was generally observed at 0.75 hours post SOI. The terminal elimination phase was not characterized for any animals due to the relatively sustained concentrations observed after Tₘₐₓ. Systemic exposure increased with dose within the range tested and the increase was approximately dose proportional. There was no notable gender-related difference in exposure. Following repeated administration, systemic exposure on Day 22 was generally higher compared to Day 1, with individual accumulation ratios ranging from 1.64 to 2.17.

A Single-Dose Intravenous Bolus Pharmacokinetic Study of ATRC-101 in Cynomolgus Monkeys with a 4-Week Observation Period (ATRC-101.PK.18.01)

[0594] The objective of this study was to evaluate the PK of ATRC-101 in cynomolgus monkeys following a single IV bolus dose administration.

[0595] In this study, 6 naïve animals (1 animal/sex/group) were randomly assigned into 3 groups and administered ATRC-101 at 1, 10, or 30 mg/kg once by IV bolus injection. ATRC-101 was formulated in 20 mM histidine, 8% sucrose, 0.02% polysorbate 80 at pH 6.0 and further diluted to the target concentration for dosing. The dose volume was 3.0 mL/kg. Pharmacokinetic samples were collected on Day 1 at pre-dose, 5 minutes, 1, 4, 8, 12, 24, 48, 96, 168, 240, 336, 504, and 672 hours post-dose. Serum concentrations of ATRC-101 were determined by an ELISA method.

[0596] Parameters in this study included survival, clinical observations, body weights, body temperature, clinical pathology (hematology and serum chemistry), and PK analysis. All animals survived to the end of study. No ATRC-101-related clinical signs were observed. There were no ATRC-101-related findings in body weights, body temperature, or clinical pathology. Serum concentrations of ATRC-101 were below the lower limit of quantification (LLOQ=20 ng/mL) in all samples collected at the pre-dose timepoint for the treated groups. Following administration of ATRC-101 on Day 1, ATRC-101 was quantifiable throughout the 672-hour sampling period for the dose levels evaluated. FIG. 63. The concentration in the female given 1 mg/kg at 8 hours post-dose was higher compared to that at 10 mg/kg (241 μg/mL vs. 129 μg/mL, respectively).

[0597] Following administration of ATRC-101, Tₘₐₓ were observed between 0.083 and 1 hour post-dose except for the female at 1 mg/kg dose level where the maximum concentration was observed at 8 hours post-dose. Maximum serum concentrations were followed by a decline of ATRC-101 with T_{1/2} ranging from 177 to 225 hours. The CL and Vd ranged between 0.159 and 0.436 mL/hr/kg and between 51.4 and 117 mL/kg, respectively.

[0598] Systemic exposure to ATRC-101, as defined by Cₘₐₓ and the area under the curve from time 0 to time of analysis (AUC₀₋ₜ), increased with dose within the range tested. The increase seemed to be approximately dose proportional for the dose levels evaluated except for the females between 1 and 10 mg/kg where the increase was lower than dose proportional. There was no notable gender-related difference in exposure except at 1 mg/kg dose level where female exposure seemed to be 2-fold higher compared to that of male.

A 4-Week Dose Range-Finding Toxicology Study with ATRC-101 in Cynomolgus Monkeys (ATRC-101.TX 18.01)

[0599] The objective of this study was to evaluate the potential non-target related toxicity and TK of ATRC-101 when administered by IV infusion once weekly for 4 weeks to cynomolgus monkeys.

[0600] In this study, 8 naïve monkeys were randomly assigned to 4 groups (1 animal/sex/group). Animals were dosed once weekly with 0 (vehicle), 10, 30, or 100 mg/kg ATRC-101 via 30-minute IV infusion for 4 weeks (4 doses). The dose volume was 5 mL/kg. Toxicokinetic samples were collected at a series of timepoints on Days 1 and 22. Serum concentrations of ATRC-101 were determined by an ELISA method.

[0601] Serum concentrations of ATRC-101 were below LLOQ (20 ng/mL) in all pre-dose samples collected at Day −7, in all samples collected in the control group on Days 1 and 22, and in all samples at the pre-dose timepoint for the treated groups on Day 1. Following administration of ATRC-101 on Days 1 and 22, ATRC-101 was quantifiable through the 168-hour sampling period for all dose levels. ATRC-101 serum concentrations in ATRC-101 treatment groups are shown in FIG. 64.

[0602] Following administration of ATRC-101, Tₘₐₓ was observed between 0.75 and 4.5 hours post SOI, corresponding to 0.25 and 4 hours post end of infusion (EOI), with most cases falling at 0.75 hours post SOI (0.25 hours post EOI). The terminal elimination phase was not characterized for any animals due to the relatively sustained concentrations observed after Tₘₐₓ.

[0603] Systemic exposure to ATRC-101, as defined by Cₘₐₓ and AUC₀₋ₜ, increased with dose within the range tested. Considering that there was 1 animal/sex/group, the increase seemed to be approximately dose proportional. There was no notable gender-related difference in exposure. Following repeated administration, systemic exposure on Day 22 was generally higher compared to Day 1, with individual accumulation ratios ranging from 1.64 to 2.17.

[0604] PK modeling approach was used to predict PK parameters of ATRC-101 in human. The observed systemic concentrations versus time of ATRC-101 in study ATRC-101.PK.18.01 were modeled with a standard 2-compartment PK model and allometrically scaled to human based on body weight. Simulations were performed to obtain predicted human serum time courses after doses of 0.1, 0.3, 1, 3, 10, and 30 mg/kg administered once every three weeks over 6 weeks. Human exposure metrics were predicted following a single IV administration. At a concentration of 0.3 mg/kg the Cₘₐₓ in human is estimated to reach 7.81 μg/mL and the AUC_{0-672 hr} is estimated to be 53.1 day·μg/mL.

[0605] The projected human PK parameters were correlated to the relevant concentrations from in vitro pharmacology studies of activity in the Target and Effector Dual Engagement Assay. In the Target and Effector Dual Engagement Assay, the half-maximal effective concentration (EC₅₀) of ATRC-101 was shown to be 68 nM. The dose response curves of ATRC-101 in this assay were fit to a four-parameter logistic regression model to assess effective concentrations (EC₂₀, EC₅₀, and EC₅₀. A dose level of 0.3 mg/kg in humans was estimated to result in a Cₘₐₓ (7.81 μg/mL) below EC₅₀ and achieve a 20% maximal effective concentration (EC₂₀) for approximately 6 days (˜33% of dosing interval; based on the Target and Effector Dual Engagement Assay.

[0606] Following a single IV bolus administration to cynomolgus monkeys at dose levels of 1, 10, and 30 mg/kg, Tₘₐₓ was observed between 0.083 and 1 hour post-dose except for the female at 1 mg/kg where it was observed at 8 hours post-dose. The T_{1/2} ranged from 177 to 225 hours. The CL and Vd ranged between 0.15 and 0.436 mL/hr/kg and 51.4 and 117 mL/kg, respectively. Systemic exposure to ATRC-101 increased with dose within the range tested and the increase seemed to be approximately dose proportional except for the females between 1 and 10 mg/kg where the increase was lower than dose proportional. There was no notable gender-related difference in exposure except at 1 mg/kg dose level where female exposure seemed to be 2-fold higher compared to that of male.

[0607] In the 4-week repeat-dose toxicity and TK study, Tₘₐₓ was generally observed at 0.75 hours post SOI following once weekly administration via 30 minute IV infusion at 10, 30, and 100 mg/kg/week. The terminal elimination phase was not characterized for any animals due to the relatively sustained concentrations observed after Tₘₐₓ. Systemic exposure increased with dose within the range tested and the increase seemed to be approximately dose proportional. There was no notable gender-related difference in exposure. Following repeated administration, systemic exposure on Day 22 was generally higher compared to Day 1, with individual accumulation ratios ranging from 1.64 to 2.17.

[0608] Collectively, these data indicate that the PK profile of ATRC-101 is typical for a human IgG1 monoclonal antibody. Data from the single dose PK study in cynomolgus monkey was used to predict the PK parameters of ATRC-101 in humans. At a dose of 0.3 mg/kg ATRC-101 the Cₘₐₓ in human is estimated to reach 7.81 μg/mL and the AUC_{0-672 hr} is estimated to be 53.1 day·μg/mL.

[0609] In accordance with regulatory guidelines, no metabolism, tissue distribution, or excretion studies with ATRC-101 have been conducted in animals. As a typical monoclonal antibody, ATRC-101 is expected to degrade into small peptides and amino acids via biochemical pathways that are independent of drug metabolizing enzymes, such as cytochromes P450 enzymes, so no drug-drug interactions are anticipated.

[0610] It is understood that the examples and embodiments described herein are for illustrative purposes only and that various modifications or changes in light thereof will be suggested to persons skilled in the art and are to be included within the spirit and purview of this application and scope of the appended claims. All publications, patents, accession numbers, and patent applications cited herein are hereby incorporated by reference for the purposes in the context of which they are cited.

TABLE 1A

| | AIP | | |
|---|---|---|---|
| | Number | V_{H} Sequence | V_{L} Sequence |
| 1 | AIP- | EVQLVESGGALVKPGGSLRLSCAA | QSVLTQPPSASGTPGQRVTISCSGSSSNI |
| | 101235 | SGFTFSKAWMSWVRQAPGKGLEWV | GSSSVSWYQQLPGTAPKLLIYKNNQRPSG |
| | | GRIKSVTDGETTDYAAPVKGRFTI | VPDRFSGSKSGTSASLAISGLRSEDEADY |
| | | SRDDSKSTLYLQMNSLKTEDTAVY | YCSTWDDSLSVRVFGGGTKLTVL (SEQ |
| | | YCTSSFCCRSGSCPSSDTSYCNGQ | ID NO: 123) |
| | | YKSYYYMDVWGKGTTVTVSS | |
| | | (SEQ ID NO: 77) | |
| 2 | AIP- | EVQLVESGGGLVQPGGSLRLSCAA | QSVLTQPPSVSAAPGQKVTISCSGSSSNI |
| | 127782 | SGFTFSKAWMSWVRQAPGKGLEWV | GSSSVSWYQQLPGTAPKLLIYKNNQRPSG |
| | | GRIKSVTDGETTEYAASVKGRFTI | IPDRFSGSKSGTSATLGITGLQTGDEADY |
| | | SRDDSKNSLYLQMNSLKTEDTAVY | YCSTWDDSLSVRVFGGGTKLTVL (SEQ |
| | | YCTSSFCCRGGSCPSHDTSYCGGQ | ID NO: 124) |
| | | YKSYYYMDVWGKGTTVTVSS | |
| | | (SEQ ID NO: 78) | |
| 3 | AIP- | EVQLVESGGALVKPGGSLRLSCAA | QSVLTQPPSASGTPGQRVTISCSGSSSNI |
| | 189473 | SGFTFSKAWMSWVRQAPGKGLEWV | GSSSVSWYQQLPGTAPKLLIYKNNQRPSG |
| | | GRIKSVTDGETTDYAAPVKGRFTI | VPDRFSGSKSGTSASLAISGLRSEDEADY |
| | | SRDDSKSTLYLQMNSLKTEDTAVY | YCSTWDDSLSVRVFGGGTKLTVL (SEQ |
| | | YCTTSFCCRGASCPSSDTSYCAGS | ID NO: 125) |
| | | YKSYYFVNIWGKGTTVTVSS | |
| | | (SEQ ID NO: 79) | |
| 4 | AIP- | EVQLVESGGALVKPGGSLRLSCAA | QSVLTQPPSASGTPGQRVTISCSGSSSNI |
| | 192571 | SGFTFSKAWMSWVRQAPGKGLEWV | GSSSVSWYQQLPGTAPKLLIYKNNQRPSG |
| | | GRIKSVTDGETTDYAAPVKGRFTI | VPDRFSGSKSGTSASLAISGLRSEDEADY |
| | | SRDDSKSTLYLQMNSLKTEDTAVY | YCSTWDDSLSVRVFGGGTKLTVL (SEQ |
| | | YCTSSFCCRGNQCPSSDTSYCGGQ | ID NO: 126) |
| | | YPSYYYMDPWGKGTTVTVSS | |
| | | (SEQ ID NO: 80) | |
| 5 | AIP- | EVQLVESGGALVKPGGSLRLSCAA | QSVLTQPPSASGTPGQRVTISCSGSSSNI |
| | 125258 | SGFTFSKAWMSWVRQAPGKGLEWV | GSSSVSWYQQLPGTAPKLLIYKNNQRPSG |
| | | GRIKSVTDGETTDYAAPVKGRFTI | VPDRFSGSKSGTSASLAISGLRSEDEADY |
| | | SRDDSKSTLYLQMNSLKTEDTAVY | YCSTWDDSLSVRVFGGGTKLTVL (SEQ |
| | | YCISSFCCRGKQCPSSDTSYCNGY | ID NO: 127) |
| | | YADYYFMDVWGKGTTVTVSS | |
| | | (SEQ ID NO: 81) | |
| 6 | AIP- | EVQLVESGGALVKPGGSLRLSCAA | QSVLTQPPSASGTPGQRVTISCSGSSSNI |
| | 150199 | SGFTFSKAWMSWVRQAPGKGLEWV | GSSSVSWYQQLPGTAPKLLIYKNNQRPSG |
| | | GRIKSVTDGETTDYAAPVKGRFTI | VPDRFSGSKSGTSASLAISGLRSEDEADY |
| | | SRDDSKSTLYLQMNSLKTEDTAVY | YCSTWDDSLSVRVFGGGTKLTVL (SEQ |
| | | YCISSFCCRGKQCPSSDTSYCGGQ | ID NO: 128) |
| | | FKSYYFMDVWGKGTTVTVSS | |
| | | (SEQ ID NO: 82) | QSVLTQPPSASGTPGQRVTISCSGSSSNI |
| 7 | AIP- | EVQLVESGGALVKPGGSLRLSCAA | GSSSVSWYQQLPGTAPKLLIYKNNQRPSG |
| | 115388 | SGFTFSKAWMSWVRQAPGKGLEWV | VPDRFSGSKSGTSASLAISGLRSEDEADY |
| | | GRIKSVTDGETTDYAAPVKGRFTI | YCSTWDDSLSVRVFGGGTKLTVL (SEQ |
| | | SRDDSKSTLYLQMNSLKTEDTAVY | ID NO: 129) |
| | | YCISSFCCHSNNCPSSDTSYCNGY | |
| | | YKQYYFMDVWGKGTTVTVSS | |
| | | (SEQ ID NO: 83) | |
| 8 | AIP- | EVQLVESGGALVKPGGSLRLSCAA | QSVLTQPPSASGTPGQRVTISCSGSSTNI |
| | 143369 | SGFTYSAAWMSWVRQAPGKGLEWV | GSSSVTWYQQLPGTAPKLLIYKDNQRPLG |
| | | GRIKAVHDGETTDYAAPVKGRFTI | VPDRFSGSKSGTSASLAISGLRSEDEADY |
| | | SRDDSKSTLYLQMNSLKTEDTAVY | YCSTWDDSLSVRVFGGGTKLTVL (SEQ |
| | | YCTSSFCCRGGSCPSHDTSYCGGQ | ID NO: 130) |
| | | YKSYYYMDVWGKGTTVTVSS | |
| | | (SEQ ID NO: 84) | |
| 9 | AIP- | EVQLVESGGALVKPGGSLRLSCAA | QSVLTQPPSASGTPGQRVTISCSGSKSNI |
| | 157045 | SGFTFSMAWMSWVRQAPGKGLEWV | GSSYVSWYQQLPGTAPKLLIYMNNQRPYG |
| | | GRIKSNTDAETTDYAAPVKGRFTI | VPDRFSGSKSGTSASLAISGLRSEDEADY |
| | | SRDDSKSTLYLQMNSLKTEDTAVY | YCATWDDQLSVRVFGGGTKLTVL (SEQ |
| | | YCTSSFCCRGGSCPSHDTSYCGGQ | ID NO: 131) |
| | | YKSYYYMDVWGKGTTVTVSS | |
| | | (SEQ ID NO: 85) | |
| 10 | AIP- | EVQLVESGGALVKPGGSLRLSCAA | QSVLTQPPSASGTPGQRVTISCSGSKSNI |
| | 175775 | SGFTFSAAWMSWVRQAPGKGLEWV | GSSSVSWYQQLPGTAPKLLIYKDNQRPSG |
| | | GRIKSVTDGETTDYAAPVKGRFTI | VPDRFSGSKSGTSASLAISGLRSEDEADY |
| | | SRDDSKSTLYLQMNSLKTEDTAVY | YCATWDNSLSIRVFGGGTKLTVL (SEQ |
| | | YCISSFCCRGNSCPSSDTSYCNGQ | ID NO: 132) |
| | | YKSYYYMDVWGKGTTVTVSS | |
| | | (SEQ ID NO: 86) | |
| 11 | AIP- | EVQLVESGGALVKPGGSLRLSCAA | QSVLTQPPSASGTPGQRVTISCSGASSNI |
| | 154181 | SGFTYSKAWMSWVRQAPGKGLEWV | GSSSVSWYQQLPGTAPKLLIYKNIQRASG |
| | | GRIKSVQDGETTDYAAPVKGRFTI | VPDRFSGSKSGTSASLAISGLRSEDEADY |
| | | SRDDSKSTLYLQMNSLKTEDTAVY | YCSSWDDSNSVRIFGGGTKLTVL (SEQ |
| | | YCTSSFCCRGGSCPSHDTSYCGGQ | ID NO: 133) |
| | | YKSFYYMDVWGKGTTVTVSS | |
| | | (SEQ ID NO: 87) | |
| 12 | AIP- | EVQLVESGGALVKPGGSLRLSCAA | QSVLTQPPSASGTPGQRVTISCSGSSTNI |
| | 125984 | SGFTFAKAWMSWVRQAPGKGLEWV | GSSTVSWYQQLPGTAPKLLIYKNNARPYG |
| | | GRIKSVTDGHTTDYAAPVKGRFTI | VPDRFSGSKSGTSASLAISGLRSEDEADY |
| | | SRDDSKSTLYLQMNSLKTEDTAVY | YCATWDDSLTVRIFGGGTKLTVL (SEQ |
| | | YCTSSFCCRGGSCPSHDTSYCGGQ | ID NO: 134) |
| | | YKSYYYMDVWGKGTTVTVSS | |
| | | (SEQ ID NO: 88) | |
| 13 | AIP- | EVQLVESGGALVKPGGSLRLSCAA | QSVLTQPPSASGTPGQRVTISCSGASSNI |
| | 160829 | SGFVFSKAWMSWVRQAPGKGLEWV | GSSSVSWYQQLPGTAPKLLIYKNTQRPSG |
| | | GRIKSVTDGGITDYAAPVKGRFTI | VPDRFSGSKSGTSASLAISGLRSEDEADY |
| | | SRDDSKSTLYLQMNSLKTEDTAVY | YCATWDDQLSVRVFGGGTKLTVL (SEQ |
| | | YCISSFCCRGNSCPSSDTSYCNGQ | ID NO: 135) |
| | | YKSYYFMDVWGKGTTVTVSS | |
| | | (SEQ ID NO: 89) | |
| 14 | AIP- | EVQLVESGGALVKPGGSLRLSCAA | QSVLTQPPSASGTPGQRVTISCSGSSTNI |
| | 184744 | SGFTFSAAWMSWVRQAPGKGLEWV | GSSSVSWYQQLPGTAPKLLIYKDNQRPSG |
| | | GRIKSTSDGETTDYAAPVKGRFTI | VPDRFSGSKSGTSASLAISGLRSEDEADY |
| | | SRDDSKSTLYLQMNSLKTEDTAVY | YCSSWDDSNSVRIFGGGTKLTVL (SEQ |
| | | YCISSFCCRGGSCPSRDTSYCGGQ | ID NO: 136) |
| | | YKSYYFMDVWGKGTTVTVSS | |
| | | (SEQ ID NO: 90) | |
| 15 | AIP- | EVQLVESGGALVKPGGSLRLSCAA | QSVLTQPPSASGTPGQRVTISCSGSKSNI |
| | 128136 | SGFTFSKAWMSWVRQAPGKGLEWV | GSSSVYWYQQLPGTAPKLLIYKNNQRPYG |
| | | GRIKSVQDGETTDYAAPVKGRFTI | VPDRFSGSKSGTSASLAISGLRSEDEADY |
| | | SRDDSKSTLYLQMNSLKTEDTAVY | YCSTWDDALSVRVFGGGTKLTVL (SEQ |
| | | YCTSSFCCRGGSCPSSDTSYCGGY | ID NO: 137) |
| | | YKSYYFMDVWGKGTTVTVSS | |
| | | (SEQ ID NO: 91) | |
| 16 | AIP- | EVQLVESGGALVKPGGSLRLSCAA | QSVLTQPPSASGTPGQRVTISCSGSSSNI |
| | 181273 | SGFTFSKAWMSWVRQAPGKGLEWV | GSSSVYWYQQLPGTAPKLLIYKNNQRPSG |
| | | GRIKSVTDGETTDYAAPVKGRFTI | VPDRFSGSKSGTSASLAISGLRSEDEADY |
| | | SRDDSKSTLYLQMNSLKTEDTAVY | YCSTWDDALSVRVFGGGTKLTVL (SEQ |
| | | YCTSSFCCRGGSCPSSDTSYCGGQ | ID NO: 138) |
| | | YKSYYFMDVWGKGTTVTVSS | |
| | | (SEQ ID NO: 92) | |
| 17 | AIP- | EVQLVESGGALVKPGGSLRLSCAA | QSVLTQPPSASGTPGQRVTISCSGSKSNI |
| | 153125 | SGFTFSKAWMSWVRQAPGKGLEWV | GSSYVSWYQQLPGTAPKLLIYKNNQRPYG |
| | | GRIKSVQDGETTDYAAPVKGRFTI | VPDRFSGSKSGTSASLAISGLRSEDEADY |
| | | SRDDSKSTLYLQMNSLKTEDTAVY | YCSTWDDSLSVRVFGGGTKLTVL (SEQ |
| | | YCTSSFCCRGGSCPSHDTSYCGGY | ID NO: 139) |
| | | YKSYYYMDVWGKGTTVTVSS | |
| | | (SEQ ID NO: 93) | |
| 18 | AIP- | EVQLVESGGALVKPGGSLRLSCAA | QSVLTQPPSASGTPGQRVTISCSGSSSNI |
| | 160470 | SGFTFSKAWMSWVRQAPGKGLEWV | GSSSVSWYQQLPGTAPKLLIYKNNQRPSG |
| | | GRIKSVTDGETTDYAAPVKGRFTI | VPDRFSGSKSGTSASLAISGLRSEDEADY |
| | | SRDDSKSTLYLQMNSLKTEDTAVY | YCSTWDDSLSVRVFGGGTKLTVL (SEQ |
| | | YCTSSFCCRGGSCPSHDTSYCGGQ | ID NO: 140) |
| | | YKSYYYMDVWGKGTTVTVSS | |
| | | (SEQ ID NO: 94) | |
| 19 | AIP- | EVQLVESGGALVKPGGSLRLSCAA | QSVLTQAPSASETPGQRVIISCSGSSSNI |
| | 192482 | SGFTFSKAWMTWVRQAPGKGLEWV | GSSSVSWYQQLPGTAPKLLIYKNNQRPSG |
| | | GRIKSVTDGETTDYAAPVKGRFTI | VPDRFSGSKSGTSASLAISGLRSEDEADY |
| | | SRDDSKSVLYLQMSSLKTEDTAVY | YCSTWDDSLSVRVFGGGTKLTVL (SEQ |
| | | FCTSSFCCRGGSCPSHDTSFCGGQ | ID NO: 141) |
| | | DKRYYYMDVWGKGTTVTVSS | |
| | | (SEQ ID NO: 95) | |
| 20 | AIP- | EVQLVESGGGLVKPGGSLRLSCAA | QSVLTQPPSASGTPGQRVTISCSGSSSNI |
| | 171142 | SGFTFSKAWMTWVRQAPGKGLEWV | GSSSVSWYQQLPGTAPKLLIYKNNQRPSG |
| | | GRIKSVTDGETTDYAAPVKGRFTI | VPDRFSGSKSGTSASLAISGLRSEDEADY |
| | | SRDDSKNTLYLQMNSLKTEDTAVY | YCSTWDDSLSVRVFGGGTKLTVL (SEQ |
| | | YCTTSFCCRGGSCPSHDTSFCGGQ | ID NO: 142) |
| | | DKRYYYMDVWGQGTTVTVSS | |
| | | (SEQ ID NO: 96) | |
| 21 | AIP- | EVQLVESGGALVKPGGSLRLSCAA | QSVLTQAPSASETPGQRVIISCSGSSSNI |
| | 157397 | SGFTFSKAWMTWVRQAPGKGLEWV | GSSSVSWYQQLPGTAPKLLIYKNNQRPSG |
| | | GRIKSVTDGETTDYAAPVKGRFTI | VPDRFSGSKSGTSASLAISGLRSEDEADY |
| | | SRDDSKSVLYLQMSSLKTEDTAVY | YCSTWDDSLSVRVFGGGTKLTVL (SEQ |
| | | FCTSSFCCRGGSCPSHDTSFCGGQ | ID NO: 143) |
| | | YNRYYYMDVWGKGTTVTVSS | |
| | | (SEQ ID NO: 97) | |
| 22 | AIP- | EVQLVESGGALVKPGGSLRLSCAA | QSVLTQAPSASETPGQRVIISCSGSSSNI |
| | 165430 | SGFTFSKAWMTWVRQAPGKGLEWV | GSSSVSWYQQLPGTAPKLLIYKNNQRPSG |
| | | GRIKSVTDGETTDYAAPVKGRFTI | VPDRFSGSKSGTSASLAISGLRSEDEADY |
| | | SRDDSKSVLYLQMSSLKTEDTAVY | YCSTWDDSLSVRVFGGGTKLTVL (SEQ |
| | | FCTSSFCCRGGSCPSHDTSFCGGQ | ID NO: 144) |
| | | YKSYYYMDVWGKGTTVTVSS | |
| | | (SEQ ID NO: 98) | |
| 23 | AIP- | EVQLVESGGGLVKPGGSLRLSCAA | QSVLTQPPSASGTPGQRVTISCSGSSSNI |
| | 189526 | SGFTFSKAWMTWVRQAPGKGLEWV | GSSSVSWYQQLPGTAPKLLIYKNNQRPSG |
| | | GRIKSTSDGGITDYAAPVKGRFTI | VPDRFSGSKSGTSASLAISGLRSEDEADY |
| | | SRDDSKNTLYLQMNSLKTEDTAVY | YCSTWDDSLSVRVFGGGTKLTVL (SEQ |
| | | YCTTSFCCRGGRCPSRDTSFCGGQ | ID NO: 145) |
| | | YNSYYYMDVWGQGTTVTVSS | |
| | | (SEQ ID NO: 99) | |
| 24 | AIP- | EVQLVESGGALVKPGGSLRLSCAA | QSVLTQPPSASGTPGQRVTISCSGSSSNI |
| | 122563 | SGFTFSKAWMTWVRQAPGKGLEWV | GSSSVSWYQQLPGTAPKLLIYKNNQRPSG |
| | | GRIKSVTDGETTDYAAPVKGRFTI | VPDRFSGSKSGTSASLAISGLRSEDEADY |
| | | SRDDSKSTLYLQMNSLKTEDTAVY | YCSTWDDSLSVRVFGGGTKLTVL (SEQ |
| | | YCTSSFCCRGGSCPSHDTSFCGGQ | ID NO: 146) |
| | | DKRYYYMDVWGKGTTVTVSS | |
| | | (SEQ ID NO: 100) | |
| 25 | AIP- | EVQLVESGGALVKPGGSLRLSCAA | QSVLTQPPSASGTPGQRVTISCSGSSSNI |
| | 158623 | SGFTFSKAWMTWVRQAPGKGLEWV | GSSSVSWYQQLPGTAPKLLIYKNNQRPSG |
| | | GRIKSVTDGETTDYAAPVKGRFTI | VPDRFSGSKSGTSASLAISGLRSEDEADY |
| | | SRDDSKSTLYLQMNSLKTEDTAVY | YCSTWDDSLSVRVFGGGTKLTVL (SEQ |
| | | YCTSSFCCRGGSCPSHDTSFCGGQ | ID NO: 147) |
| | | YKSYYYMDVWGKGTTVTVSS | |
| | | (SEQ ID NO: 101) | |
| 26 | AIP- | EVQLVESGGGLVKPGGSLRLSCAA | QSVLTQPPSASGTPGQRVTISCSGSSSNI |
| | 155066 | SGFTFSKAWMTWVRQAPGKGLEWV | GSSSVSWYQQLPGTAPKLLIYKNNQRPSG |
| | | GRIKSVTDGETTDYAAPVKGRFTI | VPDRFSGSKSGTSASLAISGLRSEDEADY |
| | | SRDDSKNTLYLQMNSLKTEDTAVY | YCSTWDDSLSVRVFGGGTKLTVL (SEQ |
| | | YCTTSFCCRGGSCPSHDTSFCGGQ | ID NO: 148) |
| | | YKSYYYMDVWGQGTTVTVSS | |
| | | (SEQ ID NO: 102) | |
| 27 | AIP- | EVQLVESGGALVKPGGSLRLSCAA | QSVLTQPPSASGTPGQRVTISCSGSSSNI |
| | 136538 | SGFTFSKAWMTWVRQAPGKGLEWV | GSSSVSWYQQLPGTAPKLLIYKNNQRPSG |
| | | GRIKSVTDGETTDYAAPVKGRFTI | VPDRFSGSKSGTSASLAISGLRSEDEADY |
| | | SRDDSKSTLYLQMNSLKTEDTAVY | YCSTWDDSLSVRVFGGGTKLTVL (SEQ |
| | | YCTSSFCCRGGSCPSHDTSFCGGQ | ID NO: 149) |
| | | DSRYYYMDVWGKGTTVTVSS | |
| | | (SEQ ID NO: 103) | |
| 28 | AIP- | EVQLVESGGALVKPGGSLRLSCAA | QSVLTQPPSASGTPGQRVTISCSGSSSNI |
| | 166120 | SGFTFSKAWMTWVRQAPGKGLEWV | GSSSVSWYQQLPGTAPKLLIYKNNQRPSG |
| | | GRIKSVTDGETTDYAAPVKGRFTI | VPDRFSGSKSGTSASLAISGLRSEDEADY |
| | | SRDDSKSTLYLQMNSLKTEDTAVY | YCSTWDDSLSVRVFGGGTKLTVL (SEQ |
| | | YCTSSFCCRGGSCPSHDTSYCGGQ | ID NO: 150) |
| | | YKSYYYMDVWGKGTTVTVSS | |
| | | (SEQ ID NO: 104) | |
| 29 | AIP- | EVQLVESGGALVKPGGSLRLSCAA | QSVLTQPPSASGTPGQRVTISCSGSSSNI |
| | 133645 | SGFTFSKAWMTWVRQAPGKGLEWV | GSSSVSWYQQLPGTAPKLLIYKNNQRPSG |
| | | GRIKSVTDGETTDYAAPVKGRFTI | VPDRFSGSKSGTSASLAISGLRSEDEADY |
| | | SRDDSKSTLYLQMNSLKTEDTAVY | YCSTWDESLSVRVFGGGTKLTVL (SEQ |
| | | YCTSSFCCRGGSCPSHDTSFCGGQ | ID NO: 151) |
| | | YKSYYYMDVWGKGTTVTVSS | |
| | | (SEQ ID NO: 105) | |
| 30 | AIP- | EVQLVESGGALVKPGGSLRLSCAA | QSVLTQPPSASGTPGQRVTISCSGSSSNI |
| | 187893 | SGFTFSKAWMSWVRQAPGKGLEWV | GSSSVSWYQQLPGTAPKLLIYKNNQRPSG |
| | | GRIKSVTDGETTDYAAPVKGRFTI | VPDRFSGSKSGTSASLAISGLRSEDEADY |
| | | SRDDSKSTLYLQMNSLKTEDTAVY | YCSTWDDSLSVRVFGGGTKLTVL (SEQ |
| | | YCTSSFCCRGGSCPSHDTSFCGGQ | ID NO: 152) |
| | | YKSYYYMDVWGKGTTVTVSS | |
| | | (SEQ ID NO: 106) | |
| 31 | AIP- | EVQLVESGGALVKPGGSLRLSCAA | QSVLTQPPSASGTPGQRVTISCSGSSSNI |
| | 142079 | SGFTFSKAWMTWVRQAPGKGLEWV | GSSSVSWYQQLPGTAPKLLIYKNNQRPSG |
| | | GRIKSVTDGETTDYAAPVKGRFTI | VPDRFSGSKSGTSASLAISGLRSEDEADY |
| | | SRDDSKSTLYLQMNSLKTEDTAVY | YCSTWDDSLSVRVFGGGTKLTVL (SEQ |
| | | YCTSSFCCRGGSCPSHDTSFCGGS | ID NO: 153) |
| | | YKSYYYMDVWGKGTTVTVSS | |
| | | (SEQ ID NO: 107) | |
| 32 | AIP- | EVQLVESGGALVKPGGSLRLSCAA | QSVLTQPPSASGTPGQRVTISCSGSSSNI |
| | 104188 | SGFTFSKAWMTWVRQAPGKGLEWV | GSSSVSWYQQLPGTAPKLLIYKNNQRPSG |
| | | GRIKSVTDGETTDYAAPVKGRFTI | VPDRFSGSKSGTSASLAISGLRSEDEADY |
| | | SRDDSKSTLYLQMNSLKTEDTAVY | YCSTWDESLSVRVFGGGTKLTVL (SEQ |
| | | YCTSSFCCRGGSCPSHDTSYCGGQ | ID NO: 154) |
| | | DSRYYYMDVWGKGTTVTVSS | |
| | | (SEQ ID NO: 108) | |
| 33 | AIP- | EVQLVESGGGLVKPGGSLRLSCAA | QSVLTQPPSASGTPGQRVTISCSGSSSNI |
| | 106042 | SGFTFSKAWMTWVRQAPGKGLEWV | GSSSVSWYQQLPGTAPKLLIYKNNQRPSG |
| | | GRIKSVTEGETTDYAAPVKGRFTI | VPDRFSGSKSGTSASLAISGLRSEDEADY |
| | | SRDDSKNTLYLQMNSLKTEDTAVY | YCSTWDESLSVRVFGGGTKLTVL (SEQ |
| | | YCTTSFCCRGGSCPSHDTSFCGGQ | ID NO: 155) |
| | | YKSYYYMDVWGQGTTVTVSS | |
| | | (SEQ ID NO: 109) | |
| 34 | AIP- | EVQLVESGGALVKPGGSLRLSCAA | QSVLTQPPSASGTPGQRVTISCSGSSSNI |
| | 100196 | SGFTFSKAWMTWVRQAPGKGLEWV | GSSSVSWYQQLPGTAPKLLIYKNNQRPSG |
| | | GRIKSVTEGETTDYAAPVKGRFTI | VPDRFSGSKSGTSASLAISGLRSEDEADY |
| | | SRDDSKSTLYLQMNSLKTEDTAVY | YCSTWDESLSVRVFGGGTKLTVL (SEQ |
| | | YCTSSFCCRGGSCPSHDTSFCGGQ | ID NO: 156) |
| | | YKSYYYMDVWGKGTTVTVSS | |
| | | (SEQ ID NO: 110) | |
| 35 | AIP- | EVQLVESGGALVKPGGSLRLSCAA | QSVLTQPPSASGTPGQRVTISCSGSSSNI |
| | 180675 | SGFTFSKAWMSWVRQAPGKGLEWV | GSSSVSWYQQLPGTAPKLLIYKNNQRPSG |
| | | GRIKSVTDGETTDYAAPVKGRFTI | VPDRFSGSKSGTSASLAISGLRSEDEADY |
| | | SRDDSKSTLYLQMNSLKTEDTAVY | YCSTWDDSLSVRVFGGGTKLTVL (SEQ |
| | | YCTSSFCCRGGSCPSHDTSYCGGQ | ID NO: 157) |
| | | YKSYYFMDVWGKGTTVTVSS | |
| | | (SEQ ID NO: 111) | |
| 36 | AIP- | EVQLVESGGALVKPGGSLRLSCAA | QSVLTQPPSASGTPGQRVTISCSGSSSNI |
| | 170105 | SGFTFSKAWMSWVRQAPGKGLEWV | GSSSVYWYQQLPGTAPKLLIYKNNQRPSG |
| | | GRIKSVTDGETTDYAAPVKGRFTI | VPDRFSGSKSGTSASLAISGLRSEDEADY |
| | | SRDDSKSTLYLQMNSLKTEDTAVY | YCSTWDDSLSVRVFGGGTKLTVL (SEQ |
| | | YCTSSFCCRGGSCPSHDTSYCGGQ | ID NO: 158) |
| | | YKSYYYMDVWGKGTTVTVSS | |
| | | (SEQ ID NO: 112) | |
| 37 | AIP- | EVQLVESGGALVKPGGSLRLSCAA | QSVLTQPPSASGTPGQRVTISCSGSSSNI |
| | 126080 | SGFTFSKAWMSWVRQAPGKGLEWV | GSSSVSWYQQLPGTAPKLLIYKNNQRPSG |
| | | GRIKSVTDGETTDYAAPVKGRFTI | VPDRFSGSKSGTSASLAISGLRSEDEADY |
| | | SRDDSKSTLYLQMNSLKTEDTAVY | YCSTWDDSLSVRVFGGGTKLTVL (SEQ |
| | | YCTSSFCCRGGSCPSHDTSYCGGQ | ID NO: 159) |
| | | NKQYYYMDVWGKGTTVTVSS | |
| | | (SEQ ID NO: 113) | |
| 38 | AIP- | EVQLVESGGALVKPGGSLRLSCAA | QSVLTQPPSASGTPGQRVTISCSGSSSNI |
| | 161571 | SGFTFSKAWMSWVRQAPGKGLEWV | GSSSVSWYQQLPGTAPKLLIYKNNQRPSG |
| | | GRIKSVTDGETTDYAAPVKGRFTI | VPDRFSGSKSGTSASLAISGLRSEDEADY |
| | | SRDDSKSTLYLQMNSLKTEDTAVY | YCSTWDDSLSVRVFGGGTKLTVL (SEQ |
| | | YCTSSFCCRGGNCPSHETSYCGNQ | ID NO: 160) |
| | | YKSYYYMDVWGKGTTVTVSS | |
| | | (SEQ ID NO: 114) | |
| 39 | AIP- | EVQLVESGGALVKPGGSLRLSCAA | QSVLTQPPSASGTPGQRVTISCSGSSSNI |
| | 181246 | SGFTFSKAWMSWVRQAPGKGLEWV | GSSSVSWYQQLPGTAPKLLIYKNNQRPSG |
| | | GRIKSVTDGETTDYAAPVKGRFTI | VPDRFSGSKSGTSASLAISGLRSEDEADY |
| | | SRDDSKSTLYLQMNSLKTEDTAVY | YCSTWDDSLSVRVFGGGTKLTVL (SEQ |
| | | YCTSSFCCRGGSCPSHDTSYCGGQ | ID NO: 161) |
| | | YKSYYYVNIWGKGTTVTVSS | |
| | | (SEQ ID NO: 115) | |
| 40 | AIP- | EVQLVESGGALVKPGGSLRLSCAA | QSVLTQPPSASGTPGQRVTISCSGSSSNI |
| | 192216 | SGFTFSKAWMSWVRQAPGKGLEWV | GSSSVSWYQQLPGTAPKLLIYKNNQRPSG |
| | | GRIKSVTDGETTDYAAPVKGRFTI | VPDRFSGSKSGTSASLAISGLRSEDEADY |
| | | SRDDSKSTLYLQMNSLKTEDTAVY | YCSTWDDSLSVRVFGGGTKLTVL (SEQ |
| | | YCTTSFCCRGASCPSHDTSYCAGS | ID NO: 162) |
| | | YKSYYYMDVWGKGTTVTVSS | |
| | | (SEQ ID NO: 116) | |
| 41 | AIP- | EVQLVESGGALVKPGGSLRLSCAA | QSVLTQPPSASGTPGQRVTISCSGSSSDI |
| | 168605 | SGFTFSKAWMSWVRQAPGKGLEWV | GSSSVSWYQQLPGTAPKLLIYKNNQRPSG |
| | | GRIKSVTDGETTDYAAPVKGRFTI | VPDRFSGSKSGTSASLAISGLRSEDEADY |
| | | SRDDSKSTLYLQMNSLKTEDTAVY | YCSTWNDALSVRVFGGGTKLTVL (SEQ |
| | | YCTSSFCCRGGSCPSHDTSYCGGQ | ID NO: 163) |
| | | YKSYYYMDVWGKGTTVTVSS | |
| | | (SEQ ID NO: 117) | |
| 42 | AIP- | EVQLVESGGALVKPGGSLRLSCAA | QSVLTQPPSASGTPGQRVTISCSGSSSNI |
| | 172872 | SGFTFSKAWMSWVRQAPGKGLEWV | GSSSVSWYQQLPGTAPKLLIYKNTQRPSG |
| | | GRIKSVTDGEQTDYAAPVKGRFTI | VPDRFSGSKSGTSASLAISGLRSEDEADY |
| | | SRDDSKSTLYLQMNSLKTEDTAVY | YCSTWDDSLNVRVFGGGTKLTVL (SEQ |
| | | YCTSSFCCRGGSCPSHDTSYCGGQ | ID NO: 164) |
| | | YKSYYYMDVWGKGTTVTVSS | |
| | | (SEQ ID NO: 118) | |
| 43 | AIP- | EVQLVESGGALVKPGGSLRLSCAA | QSVLTQPPSASGTPGQRVTISCSGSPSNI |
| | 190051 | SGFTFSKAWMTWVRQAPGKGLEWV | GSSSVSWYQQLPGTAPKLLIYKNNQRPSG |
| | | GRIKSVTDGETTDYAAPVKGRFTI | VPDRFSGSKSGTSASLAISGLRSEDEADY |
| | | SRDDSKSTLYLQMNSLKTEDTAVY | YCSTWDDALSVRVFGGGTKLTVL (SEQ |
| | | YCTSSFCCRGGSCPSHDTSYCGGQ | ID NO: 165) |
| | | YKSYYYMDVWGKGTTVTVSS | |
| | | (SEQ ID NO: 119) | |
| 44 | AIP- | EVQLVESGGALVKPGGSLRLSCAA | QSVLTQPPSASGTPGQRVTISCSGSSSNI |
| | 167533 | SGFTFSKAWMSWVRQAPGKGLEWV | GSSSVSWYQQLPGTAPKLLIYKNNQRPSG |
| | | GRIKAADDGKQTDYAAPVKGRFTI | VPDRFSGSKSGTSASLAISGLRSEDEADY |
| | | SRDDSKSTLYLQMNSLKTEDTAVY | YCSTWDDSLSVRVFGGGTKLTVL (SEQ |
| | | YCTSSFCCRGGSCPSHDTSYCGGQ | ID NO: 166) |
| | | YKSYYYMDVWGKGTTVTVSS | |
| | | (SEQ ID NO: 120) | |
| 45 | AIP- | EVQLVESGGALVKPGGSLRLSCAA | QSVLTQPPSASGTPGQRVTISCSGSSSNI |
| | 112580 | SGFTFSKAWMSWVRQAPGKGLEWV | GSSSVSWYQQLPGTAPKLLIYKNNQRPSG |
| | | GRIKSVTDGETTDYAAPVKGRFTI | VPDRFSGSKSGTSASLAISGLRSEDEADY |
| | | SRDDSKSTLYLQMNSLKTEDTAVY | YCSTWDDSLSVRVFGGGTKLTVL (SEQ |
| | | YCISSFCCRGNSCPSSDTSYCNGQ | ID NO: 167) |
| | | YKSYYYMDVWGKGTTVTVSS | |
| | | (SEQ ID NO: 121) | |
| 46 | AIP- | EVQLVESGGALVKPGGSLRLSCAA | QSVLTQPPSASGTPGQRVTISCSGSSSNI |
| | 136060 | SGFTFSKAWMSWVRQAPGKGLEWV | GSSSVSWYQQLPGTAPKLLIYKNSLRPQG |
| | | GRIKSVTDGETTDYAAPVKGRFTI | VPDRFSGSKSGTSASLAISGLRSEDEADY |
| | | SRDDSKSTLYLQMNSLKTEDTAVY | YCSTWDDSLSVRVFGGGTKLTVL (SEQ |
| | | YCTSSFCCRGGSCPSHDTSYCGGQ | ID NO: 168) |
| | | YKSYYYMDVWGKGTTVTVSS | |
| | | (SEQ ID NO: 122) | |

TABLE 1B

| | AIP | | | | | | |
|---|---|---|---|---|---|---|---|
| | Number | HCDR1 | HCDR2 | HCDR3 | LCDR1 | LCDR2 | LCDR3 |
| 1 | AIP- | GFTFSKAW | RIKSVTDGET | TSSFCCRSGS | SGSSSNIG | KNNQRPS | STWDDSLS |
| | 101235 | MS (SEQ | TDYAAPVKG | CPSSDTSYCN | SSSVS | (SEQ ID | VRV (SEQ |
| | | ID NO: 1) | (SEQ ID | GQYKSYYYMD | (SEQ ID | NO: 59) | ID |
| | | | NO: 9) | V (SEQ ID | NO: 48) | | NO: 68) |
| | | | | NO: 20) | | | |
| 2 | AIP- | GFTFSKAW | RIKSVTDGET | TSSFCCRGGS | SGSSSNIG | KNNQRPS | STWDDSLS |
| | 127782 | MS (SEQ | TEYAASVKG | CPSHDTSYCG | SSSVS | (SEQ ID | VRV (SEQ |
| | | ID NO: 1) | (SEQ ID | GQYKSYYYMD | (SEQ ID | NO: 59) | ID |
| | | | NO: 504) | V (SEQ ID | NO: 48) | | NO: 68) |
| | | | | NO: 21) | | | |
| 3 | AIP- | GFTFSKAW | RIKSVTDGET | TTSFCCRGAS | SGSSSNIG | KNNQRPS | STWDDSLS |
| | 189473 | MS (SEQ | TDYAAPVKG | CPSSDTSYCA | SSSVS | (SEQ ID | VRV (SEQ |
| | | ID NO: 1) | (SEQ ID | GSYKSYYFVN | (SEQ ID | NO: 59) | ID |
| | | | NO: 9) | I (SEQ ID | NO: 48) | | NO: 68) |
| | | | | NO: 22) | | | |
| 4 | AIP- | GFTFSKAW | RIKSVTDGET | TSSFCCRGNQ | SGSSSNIG | KNNQRPS | STWDDSLS |
| | 192571 | MS (SEQ | TDYAAPVKG | CPSSDTSYCG | SSSVS | (SEQ ID | VRV (SEQ |
| | | ID NO: 1) | (SEQ ID | GQYPSYYYMD | (SEQ ID | NO: 59) | ID |
| | | | NO: 9) | P (SEQ ID | NO: 48) | | NO: 68) |
| | | | | NO: 23) | | | |
| 5 | AIP- | GFTFSKAW | RIKSVTDGET | ISSFCCRGKQ | SGSSSNIG | KNNQRPS | STWDDSLS |
| | 125258 | MS (SEQ | TDYAAPVKG | CPSSDTSYCN | SSSVS | (SEQ ID | VRV (SEQ |
| | | ID NO: 1) | (SEQ ID | GYYADYYFMD | (SEQ ID | NO: 59) | ID |
| | | | NO: 9) | V (SEQ ID | NO: 48) | | NO: 68) |
| | | | | NO: 24) | | | |
| 6 | AIP- | GFTFSKAW | RIKSVTDGET | ISSFCCRGKQ | SGSSSNIG | KNNQRPS | STWDDSLS |
| | 150199 | MS (SEQ | TDYAAPVKG | CPSSDTSYCG | SSSVS | (SEQ ID | VRV (SEQ |
| | | ID NO: 1) | (SEQ ID | GQFKSYYFMD | (SEQ ID | NO: 59) | ID |
| | | | NO: 9) | V (SEQ ID | NO: 48) | | NO: 68) |
| | | | | NO: 25) | | | |
| 7 | AIP- | GFTFSKAW | RIKSVTDGET | ISSFCCHSNN | SGSSSNIG | KNNQRPS | STWDDSLS |
| | 115388 | MS (SEQ | TDYAAPVKG | CPSSDTSYCN | SSSVS | (SEQ ID | VRV (SEQ |
| | | ID NO: 1) | (SEQ ID | GYYKQYYFMD | (SEQ ID | NO: 59) | ID |
| | | | NO: 9) | V (SEQ ID | NO: 48) | | NO: 68) |
| | | | | NO: 26) | | | |
| 8 | AIP- | GFTYSAAW | RIKAVHDGET | TSSFCCRGGS | SGSSTNIG | KDNQRPL | STWDDSLS |
| | 143369 | MS (SEQ | TDYAAPVKG | CPSHDTSYCG | SSSVT | (SEQ ID | VRV (SEQ |
| | | ID NO: 2) | (SEQ ID | GQYKSYYYMD | (SEQ ID | NO: 60) | ID |
| | | | NO: 10) | V (SEQ ID | NO: 49) | | NO: 68) |
| | | | | NO: 21) | | | |
| 9 | AIP- | GFTFSMAW | RIKSNTDAET | TSSFCCRGGS | SGSKSNIG | MNNQRPY | ATWDDQLS |
| | 157045 | MS (SEQ | TDYAAPVKG | CPSHDTSYCG | SSYVS | (SEQ ID | VRV (SEQ |
| | | ID NO: 3) | (SEQ ID | GQYKSYYYMD | (SEQ ID | NO: 61) | ID |
| | | | NO: 11) | V (SEQ ID | NO: 50) | | NO: 69) |
| | | | | NO: 21) | | | |
| 10 | AIP- | GFTFSAAW | RIKSVTDGET | ISSFCCRGNS | SGSKSNIG | KDNQRPS | ATWDNSLS |
| | 175775 | MS (SEQ | TDYAAPVKG | CPSSDTSYCN | SSSVS | (SEQ ID | IRV (SEQ |
| | | ID NO: 4) | (SEQ ID | GQYKSYYYMD | (SEQ ID | NO: 62) | ID |
| | | | NO: 9) | V (SEQ ID | NO: 51) | | NO: 70) |
| | | | | NO: 27) | | | |
| 11 | AIP- | GFTYSKAW | RIKSVQDGET | TSSFCCRGGS | SGASSNIG | KNTQRAS | SSWDDSNS |
| | 154181 | MS (SEQ | TDYAAPVKG | CPSHDTSYCG | SSSVS | (SEQ ID | VRI (SEQ |
| | | ID NO: 5) | (SEQ ID | GQYKSFYYMD | (SEQ ID | NO: 63) | ID |
| | | | NO: 12) | V (SEQ ID | NO: 52) | | NO: 71) |
| | | | | NO: 28) | | | |
| 12 | AIP- | GFTFAKAW | RIKSVTDGHT | TSSFCCRGGS | SGSSTNIG | KNNARPY | ATWDDSLT |
| | 125984 | MS (SEQ | TDYAAPVKG | CPSHDTSYCG | SSTVS | (SEQ ID | VRI (SEQ |
| | | ID NO: 6) | (SEQ ID | GQYKSYYYMD | (SEQ ID | NO: 64) | ID |
| | | | NO: 13) | V (SEQ ID | NO: 53) | | NO: 76) |
| | | | | NO: 21) | | | |
| 13 | AIP- | GFVFSKAW | RIKSVTDGGI | ISSFCCRGNS | SGASSNIG | KNTQRPS | ATWDDQLS |
| | 160829 | MS (SEQ | TDYAAPVKG | CPSSDTSYCN | SSSVS | (SEQ ID | VRV (SEQ |
| | | ID NO: 7) | (SEQ ID | GQYKSYYFMD | (SEQ ID | NO: 65) | ID |
| | | | NO: 14) | V (SEQ ID | NO: 52) | | NO: 69) |
| | | | | NO: 29) | | | |
| 14 | AIP- | GFTFSAAW | RIKSTSDGET | ISSFCCRGGS | SGSSTNIG | KDNQRPS | SSWDDSNS |
| | 184744 | MS (SEQ | TDYAAPVKG | CPSRDTSYCG | SSSVS | (SEQ ID | VRI (SEQ |
| | | ID NO: 4) | (SEQ ID | GQYKSYYFMD | (SEQ ID | NO: 62) | ID |
| | | | NO: 15) | V (SEQ ID | NO: 54) | | NO: 71) |
| | | | | NO: 30) | | | |
| 15 | AIP- | GFTFSKAW | RIKSVQDGET | TSSFCCRGGS | SGSKSNIG | KNNQRPY | STWDDALS |
| | 128136 | MS (SEQ | TDYAAPVKG | CPSSDTSYCG | SSSVY | (SEQ ID | VRV (SEQ |
| | | ID NO: 1) | (SEQ ID | GYYKSYYFMD | (SEQ ID | NO: 66) | ID |
| | | | NO: 12) | V (SEQ ID | NO: 55) | | NO: 72) |
| | | | | NO: 31) | | | |
| 16 | AIP- | GFTFSKAW | RIKSVTDGET | TSSFCCRGGS | SGSSSNIG | KNNQRPS | STWDDALS |
| | 181273 | MS (SEQ | TDYAAPVKG | CPSSDTSYCG | SSSVY | (SEQ ID | VRV (SEQ |
| | | ID NO: 1) | (SEQ ID | GQYKSYYFMD | (SEQ ID | NO: 59) | ID |
| | | | NO: 9) | V (SEQ ID | NO: 56) | | NO: 72) |
| | | | | NO: 32) | | | |
| 17 | AIP- | GFTFSKAW | RIKSVQDGET | TSSFCCRGGS | SGSKSNIG | KNNQRPY | STWDDSLS |
| | 153125 | MS (SEQ | TDYAAPVKG | CPSHDTSYCG | SSYVS | (SEQ ID | VRV (SEQ |
| | | ID NO: 1) | (SEQ ID | GYYKSYYYMD | (SEQ ID | NO: 66) | ID |
| | | | NO: 12) | V (SEQ ID | NO: 50) | | NO: 68) |
| | | | | NO: 33) | | | |
| 18 | AIP- | GFTFSKAW | RIKSVTDGET | TSSFCCRGGS | SGSSSNIG | KNNQRPS | STWDDSLS |
| | 160470 | MS (SEQ | TDYAAPVKG | CPSHDTSYCG | SSSVS | (SEQ ID | VRV (SEQ |
| | | ID NO: 1) | (SEQ ID | GQYKSYYYMD | (SEQ ID | NO: 59) | ID |
| | | | NO: 9) | V (SEQ ID | NO: 48) | | NO: 68) |
| | | | | NO: 21) | | | |
| 19 | AIP- | GFTFSKAW | RIKSVTDGET | TSSFCCRGGS | SGSSSNIG | KNNQRPS | STWDDSLS |
| | 192482 | MT (SEQ | TDYAAPVKG | CPSHDTSFCG | SSSVS | (SEQ ID | VRV (SEQ |
| | | ID NO: 8) | (SEQ ID | GQDKRYYYMD | (SEQ ID | NO: 59) | ID |
| | | | NO: 9) | V (SEQ ID | NO: 48) | | NO: 68) |
| | | | | NO: 34) | | | |
| 20 | AIP- | GFTFSKAW | RIKSVTDGET | TTSFCCRGGS | SGSSSNIG | KNNQRPS | STWDDSLS |
| | 171142 | MT (SEQ | TDYAAPVKG | CPSHDTSFCG | SSSVS | (SEQ ID | VRV (SEQ |
| | | ID NO: 8) | (SEQ ID | GQDKRYYYMD | (SEQ ID | NO: 59) | ID |
| | | | NO: 9) | V (SEQ ID | NO: 48) | | NO: 68) |
| | | | | NO: 35) | | | |
| 21 | AIP- | GFTFSKAW | RIKSVTDGET | TSSFCCRGGS | SGSSSNIG | KNNQRPS | STWDDSLS |
| | 157397 | MT (SEQ | TDYAAPVKG | CPSHDTSFCG | SSSVS | (SEQ ID | VRV (SEQ |
| | | ID NO: 8) | (SEQ ID | GQYNRYYYMD | (SEQ ID | NO: 59) | ID |
| | | | NO: 9) | V (SEQ ID | NO: 48) | | NO: 68) |
| | | | | NO: 36) | | | |
| 22 | AIP- | GFTFSKAW | RIKSVTDGET | TSSFCCRGGS | SGSSSNIG | KNNQRPS | STWDDSLS |
| | 165430 | MT (SEQ | TDYAAPVKG | CPSHDTSFCG | SSSVS | (SEQ ID | VRV (SEQ |
| | | ID NO: 8) | (SEQ ID | GQYKSYYYMD | (SEQ ID | NO: 59) | ID |
| | | | NO: 9) | V (SEQ ID | NO: 48) | | NO: 68) |
| | | | | NO: 37) | | | |
| 23 | AIP- | GFTFSKAW | RIKSTSDGGI | TTSFCCRGGR | SGSSSNIG | KNNQRPS | STWDDSLS |
| | 189526 | MT (SEQ | TDYAAPVKG | CPSRDTSFCG | SSSVS | (SEQ ID | VRV (SEQ |
| | | ID NO: 8) | (SEQ ID | GQYNSYYYMD | (SEQ ID | NO: 59) | ID |
| | | | NO: 16) | V (SEQ ID | NO: 48) | | NO: 68) |
| | | | | NO: 38) | | | |
| 24 | AIP- | GFTFSKAW | RIKSVTDGET | TSSFCCRGGS | SGSSSNIG | KNNQRPS | STWDDSLS |
| | 122563 | MT (SEQ | TDYAAPVKG | CPSHDTSFCG | SSSVS | (SEQ ID | VRV (SEQ |
| | | ID NO: 8) | (SEQ ID | GQDKRYYYMD | (SEQ ID | NO: 59) | ID |
| | | | NO: 9) | V (SEQ ID | NO: 48) | | NO: 68) |
| | | | | NO: 34) | | | |
| 25 | AIP- | GFTFSKAW | RIKSVTDGET | TSSFCCRGGS | SGSSSNIG | KNNQRPS | STWDDSLS |
| | 158623 | MT (SEQ | TDYAAPVKG | CPSHDTSFCG | SSSVS | (SEQ ID | VRV (SEQ |
| | | ID NO: 8) | (SEQ ID | GQYKSYYYMD | (SEQ ID | NO: 59) | ID |
| | | | NO: 9) | V (SEQ ID | NO: 48) | | NO: 68) |
| | | | | NO: 37) | | | |
| 26 | AIP- | GFTFSKAW | RIKSVTDGET | TTSFCCRGGS | SGSSSNIG | KNNQRPS | STWDDSLS |
| | 155066 | MT (SEQ | TDYAAPVKG | CPSHDTSFCG | SSSVS | (SEQ ID | VRV (SEQ |
| | | ID NO: 8) | (SEQ ID | GQYKSYYYMD | (SEQ ID | NO: 59) | ID |
| | | | NO: 9) | V (SEQ ID | NO: 48) | | NO: 68) |
| | | | | NO: 39) | | | |
| 27 | AIP- | GFTFSKAW | RIKSVTDGET | TSSFCCRGGS | SGSSSNIG | KNNQRPS | STWDDSLS |
| | 136538 | MT (SEQ | TDYAAPVKG | CPSHDTSFCG | SSSVS | (SEQ ID | VRV (SEQ |
| | | ID NO: 8) | (SEQ ID | GQDSRYYYMD | (SEQ ID | NO: 59) | ID |
| | | | NO: 9) | V (SEQ ID | NO: 48) | | NO: 68) |
| | | | | NO: 40) | | | |
| 28 | AIP- | GFTFSKAW | RIKSVTDGET | TSSFCCRGGS | SGSSSNIG | KNNQRPS | STWDDSLS |
| | 166120 | MT (SEQ | TDYAAPVKG | CPSHDTSYCG | SSSVS | (SEQ ID | VRV (SEQ |
| | | ID NO: 8) | (SEQ ID | GQYKSYYYMD | (SEQ ID | NO: 59) | ID |
| | | | NO: 9) | V (SEQ ID | NO: 48) | | NO: 68) |
| | | | | NO: 21) | | | |
| 29 | AIP- | GFTFSKAW | RIKSVTDGET | TSSFCCRGGS | SGSSSNIG | KNNQRPS | STWDESLS |
| | 133645 | MT (SEQ | TDYAAPVKG | CPSHDTSFCG | SSSVS | (SEQ ID | VRV (SEQ |
| | | ID NO: 8) | (SEQ ID | GQYKSYYYMD | (SEQ ID | NO: 59) | ID |
| | | | NO: 9) | V (SEQ ID | NO: 48) | | NO: 73) |
| | | | | NO: 37) | | | |
| 30 | AIP- | GFTFSKAW | RIKSVTDGET | TSSFCCRGGS | SGSSSNIG | KNNQRPS | STWDDSLS |
| | 187893 | MS (SEQ | TDYAAPVKG | CPSHDTSFCG | SSSVS | (SEQ ID | VRV (SEQ |
| | | ID NO: 1) | (SEQ ID | GQYKSYYYMD | (SEQ ID | NO: 59) | ID |
| | | | NO: 9) | V (SEQ ID | NO: 48) | | NO: 68) |
| | | | | NO: 37) | | | |
| 31 | AIP- | GFTFSKAW | RIKSVTDGET | TSSFCCRGGS | SGSSSNIG | KNNQRPS | STWDDSLS |
| | 142079 | MT (SEQ | TDYAAPVKG | CPSHDTSFCG | SSSVS | (SEQ ID | VRV (SEQ |
| | | ID NO: 8) | (SEQ ID | GSYKSYYYMD | (SEQ ID | NO: 59) | ID |
| | | | NO: 9) | V (SEQ ID | NO: 48) | | NO: 68) |
| | | | | NO: 41) | | | |
| 32 | AIP- | GFTFSKAW | RIKSVTDGET | TSSFCCRGGS | SGSSSNIG | KNNQRPS | STWDESLS |
| | 104188 | MT (SEQ | TDYAAPVKG | CPSHDTSYCG | SSSVS | (SEQ ID | VRV (SEQ |
| | | ID NO: 8) | (SEQ ID | GQDSRYYYMD | (SEQ ID | NO: 59) | ID |
| | | | NO: 9) | V (SEQ ID | NO: 48) | | NO: 73) |
| | | | | NO: 42) | | | |
| 33 | AIP- | GFTFSKAW | RIKSVTEGET | TTSFCCRGGS | SGSSSNIG | KNNQRPS | STWDESLS |
| | 106042 | MT (SEQ | TDYAAPVKG | CPSHDTSFCG | SSSVS | (SEQ ID | VRV (SEQ |
| | | ID NO: 8) | (SEQ ID | GQYKSYYYMD | (SEQ ID | NO: 59) | ID |
| | | | NO: 17) | V (SEQ ID | NO: 48) | | NO: 73) |
| | | | | NO: 39) | | | |
| 34 | AIP- | GFTFSKAW | RIKSVTEGET | TSSFCCRGGS | SGSSSNIG | KNNQRPS | STWDESLS |
| | 100196 | MT (SEQ | TDYAAPVKG | CPSHDTSFCG | SSSVS | (SEQ ID | VRV (SEQ |
| | | ID NO: 8) | (SEQ ID | GQYKSYYYMD | (SEQ ID | NO: 59) | ID |
| | | | NO: 17) | V (SEQ ID | NO: 48) | | NO: 73) |
| | | | | NO: 37) | | | |
| 35 | AIP- | GFTFSKAW | RIKSVTDGET | TSSFCCRGGS | SGSSSNIG | KNNQRPS | STWDDSLS |
| | 180675 | MS (SEQ | TDYAAPVKG | CPSHDTSYCG | SSSVS | (SEQ ID | VRV (SEQ |
| | | ID NO: 1) | (SEQ ID | GQYKSYYFMD | (SEQ ID | NO: 59) | ID |
| | | | NO: 9) | V (SEQ ID | NO: 48) | | NO: 68) |
| | | | | NO: 43) | | | |
| 36 | AIP- | GFTFSKAW | RIKSVTDGET | TSSFCCRGGS | SGSSSNIG | KNNQRPS | STWDDSLS |
| | 170105 | MS (SEQ | TDYAAPVKG | CPSHDTSYCG | SSSVY | (SEQ ID | VRV (SEQ |
| | | ID NO: 1) | (SEQ ID | GQYKSYYYMD | (SEQ ID | NO: 59) | ID |
| | | | NO: 9) | V (SEQ ID | NO: 56) | | NO: 68) |
| | | | | NO: 21) | | | |
| 37 | AIP- | GFTFSKAW | RIKSVTDGET | TSSFCCRGGS | SGSSSNIG | KNNQRPS | STWDDSLS |
| | 126080 | MS (SEQ | TDYAAPVKG | CPSHDTSYCG | SSSVS | (SEQ ID | VRV (SEQ |
| | | ID NO: 1) | (SEQ ID | GQNKQYYYMD | (SEQ ID | NO: 59) | ID |
| | | | NO: 9) | V (SEQ ID | NO: 48) | | NO: 68) |
| | | | | NO: 44) | | | |
| 38 | AIP- | GFTFSKAW | RIKSVTDGET | TSSFCCRGGNSG | SSSNIG | KNNQRPS | STWDDSLS |
| | 161571 | MS (SEQ | TDYAAPVKG | CPSHETSYCG | SSSVS | (SEQ ID | VRV (SEQ |
| | | ID NO: 1) | (SEQ ID | NQYKSYYYMD | (SEQ ID | NO: 59) | ID |
| | | | NO: 9) | V (SEQ ID | NO: 48) | | NO: 68) |
| | | | | NO: 45) | | | |
| 39 | AIP- | GFTFSKAW | RIKSVTDGET | TSSFCCRGGS | SGSSSNIG | KNNQRPS | STWDDSLS |
| | 181246 | MS (SEQ | TDYAAPVKG | CPSHDTSYCG | SSSVS | (SEQ ID | VRV (SEQ |
| | | ID NO: 1) | (SEQ ID | GQYKSYYYVN | (SEQ ID | NO: 59) | ID |
| | | | NO: 9) | I (SEQ ID | NO: 48) | | NO: 68) |
| | | | | NO: 46) | | | |
| 40 | AIP- | GFTFSKAW | RIKSVTDGET | TTSFCCRGAS | SGSSSNIG | KNNQRPS | STWDDSLS |
| | 192216 | MS (SEQ | TDYAAPVKG | CPSHDTSYCA | SSSVS | (SEQ ID | VRV (SEQ |
| | | ID NO: 1) | (SEQ ID | GSYKSYYYMD | (SEQ ID | NO: 59) | ID |
| | | | NO: 9) | V (SEQ ID | NO: 48) | | NO: 68) |
| | | | | NO: 47) | | | |
| 41 | AIP- | GFTFSKAW | RIKSVTDGET | TSSFCCRGGS | SGSSSDIG | KNNQRPS | STWNDALS |
| | 168605 | MS (SEQ | TDYAAPVKG | CPSHDTSYCG | SSSVS | (SEQ ID | VRV (SEQ |
| | | ID NO: 1) | (SEQ ID | GQYKSYYYMD | (SEQ ID | NO: 59) | ID |
| | | | NO: 9) | V (SEQ ID | NO: 57) | | NO: 74) |
| | | | | NO: 21) | | | |
| 42 | AIP- | GFTFSKAW | RIKSVIDGEQ | TSSFCCRGGS | SGSSSNIG | KNTQRPS | STWDDSLN |
| | 172872 | MS (SEQ | TDYAAPVKG | CPSHDTSYCG | SSSVS | (SEQ ID | VRV (SEQ |
| | | ID NO: 1) | (SEQ ID | GQYKSYYYMD | (SEQ ID | NO: 65) | ID |
| | | | NO: 18) | V (SEQ ID | NO: 48) | | NO: 75) |
| | | | | NO: 21) | | | |
| 43 | AIP- | GFTFSKAW | RIKSVTDGET | TSSFCCRGGS | SGSPSNIG | KNNQRPS | STWDDALS |
| | 190051 | MT (SEQ | TDYAAPVKG | CPSHDTSYCG | SSSVS | (SEQ ID | VRV (SEQ |
| | | ID NO: 8) | (SEQ ID | GQYKSYYYMD | (SEQ ID | NO: 59) | ID |
| | | | NO: 9) | V (SEQ ID | NO: 58) | | NO: 72) |
| | | | | NO: 21) | | | |
| 44 | AIP- | GFTFSKAW | RIKAADDGKQ | TSSFCCRGGS | SGSSSNIG | KNNQRPS | STWDDSLS |
| | 167533 | MS (SEQ | TDYAAPVKG | CPSHDTSYCG | SSSVS | (SEQ ID | VRV (SEQ |
| | | ID NO: 1) | (SEQ ID | GQYKSYYYMD | (SEQ ID | NO: 59) | ID |
| | | | NO: 19) | V (SEQ ID | NO: 48) | | NO: 68) |
| | | | | NO: 21) | | | |
| 45 | AIP- | GFTFSKAW | RIKSVTDGET | ISSFCCRGNS | SGSSSNIG | KNNQRPS | STWDDSLS |
| | 112580 | MS (SEQ | TDYAAPVKG | CPSSDTSYCN | SSSVS | (SEQ ID | VRV (SEQ |
| | | ID NO: 1) | (SEQ ID | GQYKSYYYMD | (SEQ ID | NO: 59) | ID |
| | | | NO: 9) | V (SEQ ID | NO: 48) | | NO: 68) |
| | | | | NO: 27) | | | |
| 46 | AIP- | GFTFSKAW | RIKSVTDGET | TSSFCCRGGS | SGSSSNIG | KNSLRPQ | STWDDSLS |
| | 136060 | MS (SEQ | TDYAAPVKG | CPSHDTSYCG | SSSVS | (SEQ ID | VRV (SEQ |
| | | ID NO: 1) | (SEQ ID | GQYKSYYYMD | (SEQ ID | NO: 67) | ID |
| | | | NO: 9) | V (SEQ ID | NO: 48) | | NO: 68) |
| | | | | NO: 21) | | | |

TABLE 2A

| | AIP | | |
|---|---|---|---|
| | Number | V_{H} Sequence | V_{L} Sequence |
| 1 | AIP- | EVQLVESGGALVKPGGSLRLSCAA | QSVLTQAPSASETPGQRVIISCSGSSS |
| | 148327 | SGFTFSKAWMTWVRQAPGKGLEWV | NIGSSSVSWYQQLPGTAPKLLIYKNNQ |
| | | GRIKSVTEGETTDYAAPVKGRFTI | RPSGVPDRFSGSKSGTSASLAISGLRS |
| | | SRDDSKSVLYLQMSSLKTEDTAVY | EDEADYYCSTWDESLSVRVFGGGTKLT |
| | | FCTSSFCCRGGSCPSHDTSFCGGQ | VL (SEQ ID NO: 1527) |
| | | DKRYYYMDVWGKGTTVTVSS | |
| | | (SEQ ID NO: 1333) | |
| 2 | AIP- | EVQLVESGGALVKPGGSLRLSCAA | QSVLTQPPSASGTPGQRVTISCSGSSS |
| | 198092 | SGFTFSKAWMTWVRQAPGKGLEWV | NIGSSSVSWYQQLPGTAPKLLIYKNNQ |
| | | GRIKSVTEGETTDYAAPVKGRFTI | RPSGVPDRFSGSKSGTSASLAISGLRS |
| | | SRDDSKSTLYLQMNSLKTEDTAVY | EDEADYYCSTWDESLSVRVFGGGTKLT |
| | | YCTSSFCCRGGSCPSHDTSFCGGQ | VL (SEQ ID NO: 1528) |
| | | DKRYYYMDVWGKGTTVTVSS | |
| | | (SEQ ID NO: 1334) | |
| 3 | AIP- | EVQLVESGGALVKPGGSLRLSCAA | QSVLTQPPSASGTPGQRVTISCSGSSS |
| | 184490 | SGFTFSKAWMTWVRQAPGKGLEWV | NIGSSSVSWYQQLPGTAPKLLIYKNNQ |
| | | GRIKSVTDGETTDYAAPVKGRFTI | RPSGVPDRFSGSKSGTSASLAISGLRS |
| | | SRDDSKSTLYLQMNSLKTEDTAVY | EDEADYYCSTWDESLSVRVFGGGTKLT |
| | | YCTSSFCCRGGSCPSHDTSFCGGS | VL (SEQ ID NO: 1529) |
| | | YKSYYYMDVWGKGTTVTVSS | |
| | | (SEQ ID NO: 1335) | |
| 4 | AIP- | EVQLVESGGALVKPGGSLRLSCAA | QSVLTQPPSASGTPGQRVTISCSGSSS |
| | 102396 | SGFTFSKAWMSWVRQAPGKGLEWV | NIGSSSVSWYQQLPGTAPKLLIYKNNQ |
| | | GRIKSVTDGETTDYAAPVKGRFTI | RPSGVPDRFSGSKSGTSASLAISGLRS |
| | | SRDDSKSTLYLQMNSLKTEDTAVY | EDEADYYCSTWDESLSVRVFGGGTKLT |
| | | YCTSSFCCRGGSCPSHDTSYCGGQ | VL (SEQ ID NO: 1530) |
| | | YKSYYYMDVWGKGTTVTVSS | |
| | | (SEQ ID NO: 1336) | |
| 5 | AIP- | EVQLVESGGALVKPGGSLRLSCAA | QSVLTQPPSASGTPGQRVTISCSGSSS |
| | 150055 | SGYTFSKAWMSWVRQAPGKGLEWV | NIGSSSVSWYQQLPGTAPKLLIYKNNQ |
| | | GRIKSVTDGETTDYAAPVKGRFTI | RPSGVPDRFSGSKSGTSASLAISGLRS |
| | | SRDDSKSTLYLQMNSLKTEDTAVY | EDEADYYCSTWDDSLSVRVFGGGTKLT |
| | | YCTSSFCCRGGSCPSHDTSYCGGQ | VL (SEQ ID NO: 1531) |
| | | YKSYYYMDVWGKGTTVTVSS | |
| | | (SEQ ID NO: 1337) | |
| 6 | AIP- | EVQLVESGGALVKPGGSLRLSCAA | QSVLTQPPSASGTPGQRVTISCSGSSS |
| | 167084 | SGFDFSKAWMSWVRQAPGKGLEWV | NIGSSSVSWYQQLPGTAPKLLIYKNNQ |
| | | GRIKSVTDGETTDYAAPVKGRFTI | RPSGVPDRFSGSKSGTSASLAISGLRS |
| | | SRDDSKSTLYLQMNSLKTEDTAVY | EDEADYYCSTWDDSLSVRVFGGGTKLT |
| | | YCTSSFCCRGGSCPSHDTSYCGGQ | VL (SEQ ID NO: 1532) |
| | | YKSYYYMDVWGKGTTVTVSS | |
| | | (SEQ ID NO: 1338) | |
| 7 | AIP- | EVQLVESGGALVKPGGSLRLSCAA | QSVLTQPPSASGTPGQRVTISCSGSSS |
| | 185304 | SGFVFSKAWMSWVRQAPGKGLEWV | NIGSSSVSWYQQLPGTAPKLLIYKNNQ |
| | | GRIKSVTDGETTDYAAPVKGRFTI | RPSGVPDRFSGSKSGTSASLAISGLRS |
| | | SRDDSKSTLYLQMNSLKTEDTAVY | EDEADYYCSTWDDSLSVRVFGGGTKLT |
| | | YCTSSFCCRGGSCPSHDTSYCGGQ | VL (SEQ ID NO: 1533) |
| | | YKSYYYMDVWGKGTTVTVSS | |
| | | (SEQ ID NO: 1339) | |
| 8 | AIP- | EVQLVESGGALVKPGGSLRLSCAA | QSVLTQPPSASGTPGQRVTISCSGSSS |
| | 134770 | SGFTYSKAWMSWVRQAPGKGLEWV | NIGSSSVSWYQQLPGTAPKLLIYKNNQ |
| | | GRIKSVTDGETTDYAAPVKGRFTI | RPSGVPDRFSGSKSGTSASLAISGLRS |
| | | SRDDSKSTLYLQMNSLKTEDTAVY | EDEADYYCSTWDDSLSVRVFGGGTKLT |
| | | YCTSSFCCRGGSCPSHDTSYCGGQ | VL (SEQ ID NO: 1534) |
| | | YKSYYYMDVWGKGTTVTVSS | |
| | | (SEQ ID NO: 1340) | |
| 9 | AIP- | EVQLVESGGALVKPGGSLRLSCAA | QSVLTQPPSASGTPGQRVTISCSGSSS |
| | 141887 | SGFTFAKAWMSWVRQAPGKGLEWV | NIGSSSVSWYQQLPGTAPKLLIYKNNQ |
| | | GRIKSVTDGETTDYAAPVKGRFTI | RPSGVPDRFSGSKSGTSASLAISGLRS |
| | | SRDDSKSTLYLQMNSLKTEDTAVY | EDEADYYCSTWDDSLSVRVFGGGTKLT |
| | | YCTSSFCCRGGSCPSHDTSYCGGQ | VL (SEQ ID NO: 1535) |
| | | YKSYYYMDVWGKGTTVTVSS | |
| | | (SEQ ID NO: 1341) | |
| 10 | AIP- | EVQLVESGGALVKPGGSLRLSCAA | QSVLTQPPSASGTPGQRVTISCSGSSS |
| | 196203 | SGFTFSNAWMSWVRQAPGKGLEWV | NIGSSSVSWYQQLPGTAPKLLIYKNNQ |
| | | GRIKSVTDGETTDYAAPVKGRFTI | RPSGVPDRFSGSKSGTSASLAISGLRS |
| | | SRDDSKSTLYLQMNSLKTEDTAVY | EDEADYYCSTWDDSLSVRVFGGGTKLT |
| | | YCTSSFCCRGGSCPSHDTSYCGGQ | VL (SEQ ID NO: 1536) |
| | | YKSYYYMDVWGKGTTVTVSS | |
| | | (SEQ ID NO: 1342) | |
| 11 | AIP- | EVQLVESGGALVKPGGSLRLSCAA | QSVLTQPPSASGTPGQRVTISCSGSSS |
| | 184151 | SGFTFSRAWMSWVRQAPGKGLEWV | NIGSSSVSWYQQLPGTAPKLLIYKNNQ |
| | | GRIKSVTDGETTDYAAPVKGRFTI | RPSGVPDRFSGSKSGTSASLAISGLRS |
| | | SRDDSKSTLYLQMNSLKTEDTAVY | EDEADYYCSTWDDSLSVRVFGGGTKLT |
| | | YCTSSFCCRGGSCPSHDTSYCGGQ | VL (SEQ ID NO: 1537) |
| | | YKSYYYMDVWGKGTTVTVSS | |
| | | (SEQ ID NO: 1343) | |
| 12 | AIP- | EVQLVESGGALVKPGGSLRLSCAA | QSVLTQPPSASGTPGQRVTISCSGSSS |
| | 128195 | SGFTFSMAWMSWVRQAPGKGLEWV | NIGSSSVSWYQQLPGTAPKLLIYKNNQ |
| | | GRIKSVTDGETTDYAAPVKGRFTI | RPSGVPDRFSGSKSGTSASLAISGLRS |
| | | SRDDSKSTLYLQMNSLKTEDTAVY | EDEADYYCSTWDDSLSVRVFGGGTKLT |
| | | YCTSSFCCRGGSCPSHDTSYCGGQ | VL (SEQ ID NO: 1538) |
| | | YKSYYYMDVWGKGTTVTVSS | |
| | | (SEQ ID NO: 1344) | |
| 13 | AIP- | EVQLVESGGALVKPGGSLRLSCAA | QSVLTQPPSASGTPGQRVTISCSGSSS |
| | 116579 | SGFTFSAAWMSWVRQAPGKGLEWV | NIGSSSVSWYQQLPGTAPKLLIYKNNQ |
| | | GRIKSVTDGETTDYAAPVKGRFTI | RPSGVPDRFSGSKSGTSASLAISGLRS |
| | | SRDDSKSTLYLQMNSLKTEDTAVY | EDEADYYCSTWDDSLSVRVFGGGTKLT |
| | | YCTSSFCCRGGSCPSHDTSYCGGQ | VL (SEQ ID NO: 1539) |
| | | YKSYYYMDVWGKGTTVTVSS | |
| | | (SEQ ID NO: 1345) | |
| 14 | AIP- | EVQLVESGGALVKPGGSLRLSCAA | QSVLTQPPSASGTPGQRVTISCSGSSS |
| | 192329 | SGFTFSHAWMSWVRQAPGKGLEWV | NIGSSSVSWYQQLPGTAPKLLIYKNNQ |
| | | GRIKSVTDGETTDYAAPVKGRFTI | RPSGVPDRFSGSKSGTSASLAISGLRS |
| | | SRDDSKSTLYLQMNSLKTEDTAVY | EDEADYYCSTWDDSLSVRVFGGGTKLT |
| | | YCTSSFCCRGGSCPSHDTSYCGGQ | VL (SEQ ID NO: 1540) |
| | | YKSYYYMDVWGKGTTVTVSS | |
| | | (SEQ ID NO: 1346) | |
| 15 | AIP- | EVQLVESGGALVKPGGSLRLSCAA | QSVLTQPPSASGTPGQRVTISCSGSSS |
| | 192329 | SGFTFSHAWMSWVRQAPGKGLEWV | NIGSSSVSWYQQLPGTAPKLLIYKNNQ |
| | | GRIKSVTDGETTDYAAPVKGRFTI | RPSGVPDRFSGSKSGTSASLAISGLRS |
| | | SRDDSKSTLYLQMNSLKTEDTAVY | EDEADYYCSTWDDSLSVRVFGGGTKLT |
| | | YCTSSFCCRGGSCPSHDTSYCGGQ | VL (SEQ ID NO: 1541) |
| | | YKSYYYMDVWGKGTTVTVSS | |
| | | (SEQ ID NO: 1347) | |
| 16 | AIP- | EVQLVESGGALVKPGGSLRLSCAA | QSVLTQPPSASGTPGQRVTISCSGSSS |
| | 197809 | SGFTFSKAYMSWVRQAPGKGLEWV | NIGSSSVSWYQQLPGTAPKLLIYKNNQ |
| | | GRIKSVTDGETTDYAAPVKGRFTI | RPSGVPDRFSGSKSGTSASLAISGLRS |
| | | SRDDSKSTLYLQMNSLKTEDTAVY | EDEADYYCSTWDDSLSVRVFGGGTKLT |
| | | YCTSSFCCRGGSCPSHDTSYCGGQ | VL (SEQ ID NO: 1542) |
| | | YKSYYYMDVWGKGTTVTVSS | |
| | | (SEQ ID NO: 1348) | |
| 17 | AIP- | EVQLVESGGALVKPGGSLRLSCAA | QSVLTQPPSASGTPGQRVTISCSGSSS |
| | 142489 | SGFTFSKAWFSWVRQAPGKGLEWV | NIGSSSVSWYQQLPGTAPKLLIYKNNQ |
| | | GRIKSVTDGETTDYAAPVKGRFTI | RPSGVPDRFSGSKSGTSASLAISGLRS |
| | | SRDDSKSTLYLQMNSLKTEDTAVY | EDEADYYCSTWDDSLSVRVFGGGTKLT |
| | | YCTSSFCCRGGSCPSHDTSYCGGQ | VL (SEQ ID NO: 1543) |
| | | YKSYYYMDVWGKGTTVTVSS | |
| | | (SEQ ID NO: 1349) | |
| 18 | AIP- | EVQLVESGGALVKPGGSLRLSCAA | QSVLTQPPSASGTPGQRVTISCSGSSS |
| | 148102 | SGFTFSKAWMSWVRQAPGKGLEWV | NIGSSSVSWYQQLPGTAPKLLIYKNNQ |
| | | GRIQSVTDGETTDYAAPVKGRFTI | RPSGVPDRFSGSKSGTSASLAISGLRS |
| | | SRDDSKSTLYLQMNSLKTEDTAVY | EDEADYYCSTWDDSLSVRVFGGGTKLT |
| | | YCTSSFCCRGGSCPSHDTSYCGGQ | VL (SEQ ID NO: 1544) |
| | | YKSYYYMDVWGKGTTVTVSS | |
| | | (SEQ ID NO: 1350) | |
| 19 | AIP- | EVQLVESGGALVKPGGSLRLSCAA | QSVLTQPPSASGTPGQRVTISCSGSSS |
| | 167726 | SGFTFSKAWMSWVRQAPGKGLEWV | NIGSSSVSWYQQLPGTAPKLLIYKNNQ |
| | | GRIKAVTDGETTDYAAPVKGRFTI | RPSGVPDRFSGSKSGTSASLAISGLRS |
| | | SRDDSKSTLYLQMNSLKTEDTAVY | EDEADYYCSTWDDSLSVRVFGGGTKLT |
| | | YCTSSFCCRGGSCPSHDTSYCGGQ | VL (SEQ ID NO: 1545) |
| | | YKSYYYMDVWGKGTTVTVSS | |
| | | (SEQ ID NO: 1351) | |
| 20 | AIP- | EVQLVESGGALVKPGGSLRLSCAA | QSVLTQPPSASGTPGQRVTISCSGSSS |
| | 199834 | SGFTFSKAWMSWVRQAPGKGLEWV | NIGSSSVSWYQQLPGTAPKLLIYKNNQ |
| | | GRIKSATDGETTDYAAPVKGRFTI | RPSGVPDRFSGSKSGTSASLAISGLRS |
| | | SRDDSKSTLYLQMNSLKTEDTAVY | EDEADYYCSTWDDSLSVRVFGGGTKLT |
| | | YCTSSFCCRGGSCPSHDTSYCGGQ | VL (SEQ ID NO: 1546) |
| | | YKSYYYMDVWGKGTTVTVSS | |
| | | (SEQ ID NO: 1352) | |
| 21 | AIP- | EVQLVESGGALVKPGGSLRLSCAA | QSVLTQPPSASGTPGQRVTISCSGSSS |
| | 143179 | SGFTFSKAWMSWVRQAPGKGLEWV | NIGSSSVSWYQQLPGTAPKLLIYKNNQ |
| | | GRIKSNTDGETTDYAAPVKGRFTI | RPSGVPDRFSGSKSGTSASLAISGLRS |
| | | SRDDSKSTLYLQMNSLKTEDTAVY | EDEADYYCSTWDDSLSVRVFGGGTKLT |
| | | YCTSSFCCRGGSCPSHDTSYCGGQ | VL (SEQ ID NO: 1547) |
| | | YKSYYYMDVWGKGTTVTVSS | |
| | | (SEQ ID NO: 1353) | |
| 21 | AIP- | EVQLVESGGALVKPGGSLRLSCAA | QSVLTQPPSASGTPGQRVTISCSGSSS |
| | 195587 | SGFTFSKAWMSWVRQAPGKGLEWV | NIGSSSVSWYQQLPGTAPKLLIYKNNQ |
| | | GRIKSVHDGETTDYAAPVKGRFTI | RPSGVPDRFSGSKSGTSASLAISGLRS |
| | | SRDDSKSTLYLQMNSLKTEDTAVY | EDEADYYCSTWDDSLSVRVFGGGTKLT |
| | | YCTSSFCCRGGSCPSHDTSYCGGQ | VL (SEQ ID NO: 1548) |
| | | YKSYYYMDVWGKGTTVTVSS | |
| | | (SEQ ID NO: 1354) | |
| 23 | AIP- | EVQLVESGGALVKPGGSLRLSCAA | QSVLTQPPSASGTPGQRVTISCSGSSS |
| | 153462 | SGFTFSKAWMSWVRQAPGKGLEWV | NIGSSSVSWYQQLPGTAPKLLIYKNNQ |
| | | GRIKSVDDGETTDYAAPVKGRFTI | RPSGVPDRFSGSKSGTSASLAISGLRS |
| | | SRDDSKSTLYLQMNSLKTEDTAVY | EDEADYYCSTWDDSLSVRVFGGGTKLT |
| | | YCTSSFCCRGGSCPSHDTSYCGGQ | VL (SEQ ID NO: 1549) |
| | | YKSYYYMDVWGKGTTVTVSS | |
| | | (SEQ ID NO: 1355) | |
| 24 | AIP- | EVQLVESGGALVKPGGSLRLSCAA | QSVLTQPPSASGTPGQRVTISCSGSSS |
| | 115363 | SGFTFSKAWMSWVRQAPGKGLEWV | NIGSSSVSWYQQLPGTAPKLLIYKNNQ |
| | | GRIKSVQDGETTDYAAPVKGRFTI | RPSGVPDRFSGSKSGTSASLAISGLRS |
| | | SRDDSKSTLYLQMNSLKTEDTAVY | EDEADYYCSTWDDSLSVRVFGGGTKLT |
| | | YCTSSFCCRGGSCPSHDTSYCGGQ | VL (SEQ ID NO: 1550) |
| | | YKSYYYMDVWGKGTTVTVSS | |
| | | (SEQ ID NO: 1356) | |
| 25 | AIP- | EVQLVESGGALVKPGGSLRLSCAA | QSVLTQPPSASGTPGQRVTISCSGSSS |
| | 151090 | SGFTFSKAWMSWVRQAPGKGLEWV | NIGSSSVSWYQQLPGTAPKLLIYKNNQ |
| | | GRIKSVTNGETTDYAAPVKGRFTI | RPSGVPDRFSGSKSGTSASLAISGLRS |
| | | SRDDSKSTLYLQMNSLKTEDTAVY | EDEADYYCSTWDDSLSVRVFGGGTKLT |
| | | YCTSSFCCRGGSCPSHDTSYCGGQ | VL (SEQ ID NO: 1551) |
| | | YKSYYYMDVWGKGTTVTVSS | |
| | | (SEQ ID NO: 1357) | |
| 26 | AIP- | EVQLVESGGALVKPGGSLRLSCAA | QSVLTQPPSASGTPGQRVTISCSGSSS |
| | 168083 | SGFTFSKAWMSWVRQAPGKGLEWV | NIGSSSVSWYQQLPGTAPKLLIYKNNQ |
| | | GRIKSVTDAETTDYAAPVKGRFTI | RPSGVPDRFSGSKSGTSASLAISGLRS |
| | | SRDDSKSTLYLQMNSLKTEDTAVY | EDEADYYCSTWDDSLSVRVFGGGTKLT |
| | | YCTSSFCCRGGSCPSHDTSYCGGQ | VL (SEQ ID NO: 1552) |
| | | YKSYYYMDVWGKGTTVTVSS | |
| | | (SEQ ID NO: 1358) | |
| 27 | AIP- | EVQLVESGGALVKPGGSLRLSCAA | QSVLTQPPSASGTPGQRVTISCSGSSS |
| | 161082 | SGFTFSKAWMSWVRQAPGKGLEWV | NIGSSSVSWYQQLPGTAPKLLIYKNNQ |
| | | GRIKSVTDGQTTDYAAPVKGRFTI | RPSGVPDRFSGSKSGTSASLAISGLRS |
| | | SRDDSKSTLYLQMNSLKTEDTAVY | EDEADYYCSTWDDSLSVRVFGGGTKLT |
| | | YCTSSFCCRGGSCPSHDTSYCGGQ | VL (SEQ ID NO: 1553) |
| | | YKSYYYMDVWGKGTTVTVSS | |
| | | (SEQ ID NO: 1359) | |
| 28 | AIP- | EVQLVESGGALVKPGGSLRLSCAA | QSVLTQPPSASGTPGQRVTISCSGSSS |
| | 114196 | SGFTFSKAWMSWVRQAPGKGLEWV | NIGSSSVSWYQQLPGTAPKLLIYKNNQ |
| | | GRIKSVTDGHTTDYAAPVKGRFTI | RPSGVPDRFSGSKSGTSASLAISGLRS |
| | | SRDDSKSTLYLQMNSLKTEDTAVY | EDEADYYCSTWDDSLSVRVFGGGTKLT |
| | | YCTSSFCCRGGSCPSHDTSYCGGQ | VL (SEQ ID NO: 1554) |
| | | YKSYYYMDVWGKGTTVTVSS | |
| | | (SEQ ID NO: 1360) | |
| 29 | AIP- | EVQLVESGGALVKPGGSLRLSCAA | QSVLTQPPSASGTPGQRVTISCSGSSS |
| | 189338 | SGFTFSKAWMSWVRQAPGKGLEWV | NIGSSSVSWYQQLPGTAPKLLIYKNNQ |
| | | GRIKSVTDGEQTDYAAPVKGRFTI | RPSGVPDRFSGSKSGTSASLAISGLRS |
| | | SRDDSKSTLYLQMNSLKTEDTAVY | EDEADYYCSTWDDSLSVRVFGGGTKLT |
| | | YCTSSFCCRGGSCPSHDTSYCGGQ | VL (SEQ ID NO: 1555) |
| | | YKSYYYMDVWGKGTTVTVSS | |
| | | (SEQ ID NO: 1361) | |
| 30 | AIP- | EVQLVESGGALVKPGGSLRLSCAA | QSVLTQPPSASGTPGQRVTISCSGSSS |
| | 183190 | SGFTFSKAWMSWVRQAPGKGLEWV | NIGSSSVSWYQQLPGTAPKLLIYKNNQ |
| | | GRIKSVTDGEATDYAAPVKGRFTI | RPSGVPDRFSGSKSGTSASLAISGLRS |
| | | SRDDSKSTLYLQMNSLKTEDTAVY | EDEADYYCSTWDDSLSVRVFGGGTKLT |
| | | YCTSSFCCRGGSCPSHDTSYCGGQ | VL (SEQ ID NO: 1556) |
| | | YKSYYYMDVWGKGTTVTVSS | |
| | | (SEQ ID NO: 1362) | |
| 31 | AIP- | EVQLVESGGALVKPGGSLRLSCAA | QSVLTQPPSASGTPGQRVTISCSGSSS |
| | 110143 | SGFTFSKAWMSWVRQAPGKGLEWV | NIGSSSVSWYQQLPGTAPKLLIYKNNQ |
| | | GRIKSVTDGETTDYASPVKGRFTI | RPSGVPDRFSGSKSGTSASLAISGLRS |
| | | SRDDSKSTLYLQMNSLKTEDTAVY | EDEADYYCSTWDDSLSVRVFGGGTKLT |
| | | YCTSSFCCRGGSCPSHDTSYCGGQ | VL (SEQ ID NO: 1557) |
| | | YKSYYYMDVWGKGTTVTVSS | |
| | | (SEQ ID NO: 1363) | |
| 32 | AIP- | EVQLVESGGALVKPGGSLRLSCAA | QSVLTQPPSASGTPGQRVTISCSGSSS |
| | 147176 | SGFTFSKAWMSWVRQAPGKGLEWV | NIGSSSVSWYQQLPGTAPKLLIYKNNQ |
| | | GRIKSVTDGETTDYAAPVQGRFTI | RPSGVPDRFSGSKSGTSASLAISGLRS |
| | | SRDDSKSTLYLQMNSLKTEDTAVY | EDEADYYCSTWDDSLSVRVFGGGTKLT |
| | | YCTSSFCCRGGSCPSHDTSYCGGQ | VL (SEQ ID NO: 1558) |
| | | YKSYYYMDVWGKGTTVTVSS | |
| | | (SEQ ID NO: 1364) | |
| 33 | AIP- | EVQLVESGGALVKPGGSLRLSCAA | QSVLTQPPSASGTPGQRVTISCSGSSS |
| | 134312 | SGFTFSKAWMSWVRQAPGKGLEWV | NIGSSSVSWYQQLPGTAPKLLIYKNNQ |
| | | GRIKSVTDGETTDYAAPVKGRFTI | RPSGVPDRFSGSKSGTSASLAISGLRS |
| | | SRDDSKSTLYLQMNSLKTEDTAVY | EDEADYYCSTWDDSLSVRVFGGGTKLT |
| | | YCISSFCCRGGSCPSHDTSYCGGQ | VL (SEQ ID NO: 1559) |
| | | YKSYYYMDVWGKGTTVTVSS | |
| | | (SEQ ID NO: 1365) | |
| 34 | AIP- | EVQLVESGGALVKPGGSLRLSCAA | QSVLTQPPSASGTPGQRVTISCSGSSS |
| | 128243 | SGFTFSKAWMSWVRQAPGKGLEWV | NIGSSSVSWYQQLPGTAPKLLIYKNNQ |
| | | GRIKSVTDGETTDYAAPVKGRFTI | RPSGVPDRFSGSKSGTSASLAISGLRS |
| | | SRDDSKSTLYLQMNSLKTEDTAVY | EDEADYYCSTWDDSLSVRVFGGGTKLT |
| | | YCTTSFCCRGGSCPSHDTSYCGGQ | VL (SEQ ID NO: 1560) |
| | | YKSYYYMDVWGKGTTVTVSS (SEQ | |
| | | ID NO: 1366) | |
| 35 | AIP- | EVQLVESGGALVKPGGSLRLSCAA | QSVLTQPPSASGTPGQRVTISCSGSSS |
| | 156172 | SGFTFSKAWMSWVRQAPGKGLEWV | NIGSSSVSWYQQLPGTAPKLLIYKNNQ |
| | | GRIKSVTDGETTDYAAPVKGRFTI | RPSGVPDRFSGSKSGTSASLAISGLRS |
| | | SRDDSKSTLYLQMNSLKTEDTAVY | EDEADYYCSTWDDSLSVRVFGGGTKLT |
| | | YCTSPFCCRGGSCPSHDTSYCGGQ | VL (SEQ ID NO: 1561) |
| | | YKSYYYMDVWGKGTTVTVSS | |
| | | (SEQ ID NO: 1367) | |
| 36 | AIP- | EVQLVESGGALVKPGGSLRLSCAA | QSVLTQPPSASGTPGQRVTISCSGSSS |
| | 147389 | SGFTFSKAWMSWVRQAPGKGLEWV | NIGSSSVSWYQQLPGTAPKLLIYKNNQ |
| | | GRIKSVTDGETTDYAAPVKGRFTI | RPSGVPDRFSGSKSGTSASLAISGLRS |
| | | SRDDSKSTLYLQMNSLKTEDTAVY | EDEADYYCSTWDDSLSVRVFGGGTKLT |
| | | YCTSAFCCRGGSCPSHDTSYCGGQ | VL (SEQ ID NO: 1562) |
| | | YKSYYYMDVWGKGTTVTVSS | |
| | | (SEQ ID NO: 1368) | |
| 37 | AIP- | EVQLVESGGALVKPGGSLRLSCAA | QSVLTQPPSASGTPGQRVTISCSGSSS |
| | 124314 | SGFTFSKAWMSWVRQAPGKGLEWV | NIGSSSVSWYQQLPGTAPKLLIYKNNQ |
| | | GRIKSVTDGETTDYAAPVKGRFTI | RPSGVPDRFSGSKSGTSASLAISGLRS |
| | | SRDDSKSTLYLQMNSLKTEDTAVY | EDEADYYCSTWDDSLSVRVFGGGTKLT |
| | | YCTSSYCCRGGSCPSHDTSYCGGQ | VL (SEQ ID NO: 1563) |
| | | YKSYYYMDVWGKGTTVTVSS | |
| | | (SEQ ID NO: 1369) | |
| 38 | AIP- | EVQLVESGGALVKPGGSLRLSCAA | QSVLTQPPSASGTPGQRVTISCSGSSS |
| | 185291 | SGFTFSKAWMSWVRQAPGKGLEWV | NIGSSSVSWYQQLPGTAPKLLIYKNNQ |
| | | GRIKSVTDGETTDYAAPVKGRFTI | RPSGVPDRFSGSKSGTSASLAISGLRS |
| | | SRDDSKSTLYLQMNSLKTEDTAVY | EDEADYYCSTWDDSLSVRVFGGGTKLT |
| | | YCTSSFCCLGGSCPSHDTSYCGGQ | VL (SEQ ID NO: 1564) |
| | | YKSYYYMDVWGKGTTVTVSS | |
| | | (SEQ ID NO: 1370) | |
| 39 | AIP- | EVQLVESGGALVKPGGSLRLSCAA | QSVLTQPPSASGTPGQRVTISCSGSSS |
| | 135247 | SGFTFSKAWMSWVRQAPGKGLEWV | NIGSSSVSWYQQLPGTAPKLLIYKNNQ |
| | | GRIKSVTDGETTDYAAPVKGRFTI | RPSGVPDRFSGSKSGTSASLAISGLRS |
| | | SRDDSKSTLYLQMNSLKTEDTAVY | EDEADYYCSTWDDSLSVRVFGGGTKLT |
| | | YCTSSFCCHGGSCPSHDTSYCGGQ | VL (SEQ ID NO: 1565) |
| | | YKSYYYMDVWGKGTTVTVSS | |
| | | (SEQ ID NO: 1371) | |
| 40 | AIP- | EVQLVESGGALVKPGGSLRLSCAA | QSVLTQPPSASGTPGQRVTISCSGSSS |
| | 113513 | SGFTFSKAWMSWVRQAPGKGLEWV | NIGSSSVSWYQQLPGTAPKLLIYKNNQ |
| | | GRIKSVTDGETTDYAAPVKGRFTI | RPSGVPDRFSGSKSGTSASLAISGLRS |
| | | SRDDSKSTLYLQMNSLKTEDTAVY | EDEADYYCSTWDDSLSVRVFGGGTKLT |
| | | YCTSSFCCQGGSCPSHDTSYCGGQ | VL (SEQ ID NO: 1566) |
| | | YKSYYYMDVWGKGTTVTVSS | |
| | | (SEQ ID NO: 1372) | |
| 41 | AIP- | EVQLVESGGALVKPGGSLRLSCAA | QSVLTQPPSASGTPGQRVTISCSGSSS |
| | 102299 | SGFTFSKAWMSWVRQAPGKGLEWV | NIGSSSVSWYQQLPGTAPKLLIYKNNQ |
| | | GRIKSVTDGETTDYAAPVKGRFTI | RPSGVPDRFSGSKSGTSASLAISGLRS |
| | | SRDDSKSTLYLQMNSLKTEDTAVY | EDEADYYCSTWDDSLSVRVFGGGTKLT |
| | | YCTSSFCCRSGSCPSHDTSYCGGQ | VL (SEQ ID NO: 1567) |
| | | YKSYYYMDVWGKGTTVTVSS | |
| | | (SEQ ID NO: 1373) | |
| 42 | AIP- | EVQLVESGGALVKPGGSLRLSCAA | QSVLTQPPSASGTPGQRVTISCSGSSS |
| | 179097 | SGFTFSKAWMSWVRQAPGKGLEWV | NIGSSSVSWYQQLPGTAPKLLIYKNNQ |
| | | GRIKSVTDGETTDYAAPVKGRFTI | RPSGVPDRFSGSKSGTSASLAISGLRS |
| | | SRDDSKSTLYLQMNSLKTEDTAVY | EDEADYYCSTWDDSLSVRVFGGGTKLT |
| | | YCTSSFCCRGASCPSHDTSYCGGQ | VL (SEQ ID NO: 1568) |
| | | YKSYYYMDVWGKGTTVTVSS | |
| | | (SEQ ID NO: 1374) | |
| 4 | 3AIP- | EVQLVESGGALVKPGGSLRLSCAA | QSVLTQPPSASGTPGQRVTISCSGSSS |
| | 109343 | SGFTFSKAWMSWVRQAPGKGLEWV | NIGSSSVSWYQQLPGTAPKLLIYKNNQ |
| | | GRIKSVTDGETTDYAAPVKGRFTI | RPSGVPDRFSGSKSGTSASLAISGLRS |
| | | SRDDSKSTLYLQMNSLKTEDTAVY | EDEADYYCSTWDDSLSVRVFGGGTKLT |
| | | YCTSSFCCRGKSCPSHDTSYCGGQ | VL (SEQ ID NO: 1569) |
| | | YKSYYYMDVWGKGTTVTVSS | |
| | | (SEQ ID NO: 1375) | |
| 44 | AIP- | EVQLVESGGALVKPGGSLRLSCAA | QSVLTQPPSASGTPGQRVTISCSGSSS |
| | 119622 | SGFTFSKAWMSWVRQAPGKGLEWV | NIGSSSVSWYQQLPGTAPKLLIYKNNQ |
| | | GRIKSVTDGETTDYAAPVKGRFTI | RPSGVPDRFSGSKSGTSASLAISGLRS |
| | | SRDDSKSTLYLQMNSLKTEDTAVY | EDEADYYCSTWDDSLSVRVFGGGTKLT |
| | | YCTSSFCCRGNSCPSHDTSYCGGQ | VL (SEQ ID NO: 1570) |
| | | YKSYYYMDVWGKGTTVTVSS | |
| | | (SEQ ID NO: 1376) | |
| 45 | AIP- | EVQLVESGGALVKPGGSLRLSCAA | QSVLTQPPSASGTPGQRVTISCSGSSS |
| | 191735 | SGFTFSKAWMSWVRQAPGKGLEWV | NIGSSSVSWYQQLPGTAPKLLIYKNNQ |
| | | GRIKSVTDGETTDYAAPVKGRFTI | RPSGVPDRFSGSKSGTSASLAISGLRS |
| | | SRDDSKSTLYLQMNSLKTEDTAVY | EDEADYYCSTWDDSLSVRVFGGGTKLT |
| | | YCTSSFCCRGGNCPSHDTSYCGGQ | VL (SEQ ID NO: 1571) |
| | | YKSYYYMDVWGKGTTVTVSS | |
| | | (SEQ ID NO: 1377) | |
| 46 | AIP- | EVQLVESGGALVKPGGSLRLSCAA | QSVLTQPPSASGTPGQRVTISCSGSSS |
| | 157078 | SGFTFSKAWMSWVRQAPGKGLEWV | NIGSSSVSWYQQLPGTAPKLLIYKNNQ |
| | | GRIKSVTDGETTDYAAPVKGRFTI | RPSGVPDRFSGSKSGTSASLAISGLRS |
| | | SRDDSKSTLYLQMNSLKTEDTAVY | EDEADYYCSTWDDSLSVRVFGGGTKLT |
| | | YCTSSFCCRGGQCPSHDTSYCGGQ | VL (SEQ ID NO: 1572) |
| | | YKSYYYMDVWGKGTTVTVSS | |
| | | (SEQ ID NO: 1378) | |
| 47 | AIP- | EVQLVESGGALVKPGGSLRLSCAA | QSVLTQPPSASGTPGQRVTISCSGSSS |
| | 153475 | SGFTFSKAWMSWVRQAPGKGLEWV | NIGSSSVSWYQQLPGTAPKLLIYKNNQ |
| | | GRIKSVTDGETTDYAAPVKGRFTI | RPSGVPDRFSGSKSGTSASLAISGLRS |
| | | SRDDSKSTLYLQMNSLKTEDTAVY | EDEADYYCSTWDDSLSVRVFGGGTKLT |
| | | YCTSSFCCRGGACPSHDTSYCGGQ | VL (SEQ ID NO: 1573) |
| | | YKSYYYMDVWGKGTTVTVSS | |
| | | (SEQ ID NO: 1379) | |
| 48 | AIP- | EVQLVESGGALVKPGGSLRLSCAA | QSVLTQPPSASGTPGQRVTISCSGSSS |
| | 133650 | SGFTFSKAWMSWVRQAPGKGLEWV | NIGSSSVSWYQQLPGTAPKLLIYKNNQ |
| | | GRIKSVTDGETTDYAAPVKGRFTI | RPSGVPDRFSGSKSGTSASLAISGLRS |
| | | SRDDSKSTLYLQMNSLKTEDTAVY | EDEADYYCSTWDDSLSVRVFGGGTKLT |
| | | YCTSSFCCRGGSCASHDTSYCGGQ | VL (SEQ ID NO: 1574) |
| | | YKSYYYMDVWGKGTTVTVSS | |
| | | (SEQ ID NO: 1380) | |
| 49 | AIP- | EVQLVESGGALVKPGGSLRLSCAA | QSVLTQPPSASGTPGQRVTISCSGSSS |
| | 190915 | SGFTFSKAWMSWVRQAPGKGLEWV | NIGSSSVSWYQQLPGTAPKLLIYKNNQ |
| | | GRIKSVTDGETTDYAAPVKGRFTI | RPSGVPDRFSGSKSGTSASLAISGLRS |
| | | SRDDSKSTLYLQMNSLKTEDTAVY | EDEADYYCSTWDDSLSVRVFGGGTKLT |
| | | YCTSSFCCRGGSCLSHDTSYCGGQ | VL (SEQ ID NO: 1575) |
| | | YKSYYYMDVWGKGTTVTVSS | |
| | | (SEQ ID NO: 1381) | |
| 50 | AIP- | EVQLVESGGALVKPGGSLRLSCAA | QSVLTQPPSASGTPGQRVTISCSGSSS |
| | 105241 | SGFTFSKAWMSWVRQAPGKGLEWV | NIGSSSVSWYQQLPGTAPKLLIYKNNQ |
| | | GRIKSVTDGETTDYAAPVKGRFTI | RPSGVPDRFSGSKSGTSASLAISGLRS |
| | | SRDDSKSTLYLQMNSLKTEDTAVY | EDEADYYCSTWDDSLSVRVFGGGTKLT |
| | | YCTSSFCCRGGSCPAHDTSYCGGQ | VL (SEQ ID NO: 1576) |
| | | YKSYYYMDVWGKGTTVTVSS | |
| | | (SEQ ID NO: 1382) | |
| 51 | AIP- | EVQLVESGGALVKPGGSLRLSCAA | QSVLTQPPSASGTPGQRVTISCSGSSS |
| | 167400 | SGFTFSKAWMSWVRQAPGKGLEWV | NIGSSSVSWYQQLPGTAPKLLIYKNNQ |
| | | GRIKSVTDGETTDYAAPVKGRFTI | RPSGVPDRFSGSKSGTSASLAISGLRS |
| | | SRDDSKSTLYLQMNSLKTEDTAVY | EDEADYYCSTWDDSLSVRVFGGGTKLT |
| | | YCTSSFCCRGGSCPNHDTSYCGGQ | VL (SEQ ID NO: 1577) |
| | | YKSYYYMDVWGKGTTVTVSS | |
| | | (SEQ ID NO: 1383) | |
| 52 | AIP- | EVQLVESGGALVKPGGSLRLSCAA | QSVLTQPPSASGTPGQRVTISCSGSSS |
| | 109729 | SGFTFSKAWMSWVRQAPGKGLEWV | NIGSSSVSWYQQLPGTAPKLLIYKNNQ |
| | | GRIKSVTDGETTDYAAPVKGRFTI | RPSGVPDRFSGSKSGTSASLAISGLRS |
| | | SRDDSKSTLYLQMNSLKTEDTAVY | EDEADYYCSTWDDSLSVRVFGGGTKLT |
| | | YCTSSFCCRGGSCPSSDTSYCGGQ | VL (SEQ ID NO: 1578) |
| | | YKSYYYMDVWGKGTTVTVSS | |
| | | (SEQ ID NO: 1384) | |
| 53 | AIP- | EVQLVESGGALVKPGGSLRLSCAA | QSVLTQPPSASGTPGQRVTISCSGSSS |
| | 151709 | SGFTFSKAWMSWVRQAPGKGLEWV | NIGSSSVSWYQQLPGTAPKLLIYKNNQ |
| | | GRIKSVTDGETTDYAAPVKGRFTI | RPSGVPDRFSGSKSGTSASLAISGLRS |
| | | SRDDSKSTLYLQMNSLKTEDTAVY | EDEADYYCSTWDDSLSVRVFGGGTKLT |
| | | YCTSSFCCRGGSCPSQDTSYCGGQ | VL (SEQ ID NO: 1579) |
| | | YKSYYYMDVWGKGTTVTVSS | |
| | | (SEQ ID NO: 1385) | |
| 54 | AIP- | EVQLVESGGALVKPGGSLRLSCAA | QSVLTQPPSASGTPGQRVTISCSGSSS |
| | 137169 | SGFTFSKAWMSWVRQAPGKGLEWV | NIGSSSVSWYQQLPGTAPKLLIYKNNQ |
| | | GRIKSVTDGETTDYAAPVKGRFTI | RPSGVPDRFSGSKSGTSASLAISGLRS |
| | | SRDDSKSTLYLQMNSLKTEDTAVY | EDEADYYCSTWDDSLSVRVFGGGTKLT |
| | | YCTSSFCCRGGSCPSHETSYCGGQ | VL (SEQ ID NO: 1580) |
| | | YKSYYYMDVWGKGTTVTVSS | |
| | | (SEQ ID NO: 1386) | |
| 55 | AIP- | EVQLVESGGALVKPGGSLRLSCAA | QSVLTQPPSASGTPGQRVTISCSGSSS |
| | 199616 | SGFTFSKAWMSWVRQAPGKGLEWV | NIGSSSVSWYQQLPGTAPKLLIYKNNQ |
| | | GRIKSVTDGETTDYAAPVKGRFTI | RPSGVPDRFSGSKSGTSASLAISGLRS |
| | | SRDDSKSTLYLQMNSLKTEDTAVY | EDEADYYCSTWDDSLSVRVFGGGTKLT |
| | | YCTSSFCCRGGSCPSHDQSYCGGQ | VL (SEQ ID NO: 1581) |
| | | YKSYYYMDVWGKGTTVTVSS | |
| | | (SEQ ID NO: 1387) | |
| 56 | AIP- | EVQLVESGGALVKPGGSLRLSCAA | QSVLTQPPSASGTPGQRVTISCSGSSS |
| | 189296 | SGFTFSKAWMSWVRQAPGKGLEWV | NIGSSSVSWYQQLPGTAPKLLIYKNNQ |
| | | GRIKSVTDGETTDYAAPVKGRFTI | RPSGVPDRFSGSKSGTSASLAISGLRS |
| | | SRDDSKSTLYLQMNSLKTEDTAVY | EDEADYYCSTWDDSLSVRVFGGGTKLT |
| | | YCTSSFCCRGGSCPSHDTSMCGGQ | VL (SEQ ID NO: 1582) |
| | | YKSYYYMDVWGKGTTVTVSS | |
| | | (SEQ ID NO: 1388) | |
| 57 | AIP- | EVQLVESGGALVKPGGSLRLSCAA | QSVLTQPPSASGTPGQRVTISCSGSSS |
| | 152283 | SGFTFSKAWMSWVRQAPGKGLEWV | NIGSSSVSWYQQLPGTAPKLLIYKNNQ |
| | | GRIKSVTDGETTDYAAPVKGRFTI | RPSGVPDRFSGSKSGTSASLAISGLRS |
| | | SRDDSKSTLYLQMNSLKTEDTAVY | EDEADYYCSTWDDSLSVRVFGGGTKLT |
| | | YCTSSFCCRGGSCPSHDTSYCAGQ | VL (SEQ ID NO: 1583) |
| | | YKSYYYMDVWGKGTTVTVSS | |
| | | (SEQ ID NO: 1389) | |
| 58 | AIP- | EVQLVESGGALVKPGGSLRLSCAA | QSVLTQPPSASGTPGQRVTISCSGSSS |
| | 136628 | SGFTFSKAWMSWVRQAPGKGLEWV | NIGSSSVSWYQQLPGTAPKLLIYKNNQ |
| | | GRIKSVTDGETTDYAAPVKGRFTI | RPSGVPDRFSGSKSGTSASLAISGLRS |
| | | SRDDSKSTLYLQMNSLKTEDTAVY | EDEADYYCSTWDDSLSVRVFGGGTKLT |
| | | YCTSSFCCRGGSCPSHDTSYCNGQ | VL (SEQ ID NO: 1584) |
| | | YKSYYYMDVWGKGTTVTVSS | |
| | | (SEQ ID NO: 1390) | |
| 59 | AIP- | EVQLVESGGALVKPGGSLRLSCAA | QSVLTQPPSASGTPGQRVTISCSGSSS |
| | 100340 | SGFTFSKAWMSWVRQAPGKGLEWV | NIGSSSVSWYQQLPGTAPKLLIYKNNQ |
| | | GRIKSVTDGETTDYAAPVKGRFTI | RPSGVPDRFSGSKSGTSASLAISGLRS |
| | | SRDDSKSTLYLQMNSLKTEDTAVY | EDEADYYCSTWDDSLSVRVFGGGTKLT |
| | | YCTSSFCCRGGSCPSHDTSYCGNQ | VL (SEQ ID NO: 1585) |
| | | YKSYYYMDVWGKGTTVTVSS | |
| | | (SEQ ID NO: 1391) | |
| 60 | AIP- | EVQLVESGGALVKPGGSLRLSCAA | QSVLTQPPSASGTPGQRVTISCSGSSS |
| | 166959 | SGFTFSKAWMSWVRQAPGKGLEWV | NIGSSSVSWYQQLPGTAPKLLIYKNNQ |
| | | GRIKSVTDGETTDYAAPVKGRFTI | RPSGVPDRFSGSKSGTSASLAISGLRS |
| | | SRDDSKSTLYLQMNSLKTEDTAVY | EDEADYYCSTWDDSLSVRVFGGGTKLT |
| | | YCTSSFCCRGGSCPSHDTSYCGAQ | VL (SEQ ID NO: 1586) |
| | | YKSYYYMDVWGKGTTVTVSS | |
| | | (SEQ ID NO: 1392) | |
| 61 | AIP- | EVQLVESGGALVKPGGSLRLSCAA | QSVLTQPPSASGTPGQRVTISCSGSSS |
| | 190362 | SGFTFSKAWMSWVRQAPGKGLEWV | NIGSSSVSWYQQLPGTAPKLLIYKNNQ |
| | | GRIKSVTDGETTDYAAPVKGRFTI | RPSGVPDRFSGSKSGTSASLAISGLRS |
| | | SRDDSKSTLYLQMNSLKTEDTAVY | EDEADYYCSTWDDSLSVRVFGGGTKLT |
| | | YCTSSFCCRGGSCPSHDTSYCGGS | VL (SEQ ID NO: 1587) |
| | | YKSYYYMDVWGKGTTVTVSS | |
| | | (SEQ ID NO: 1393) | |
| 62 | AIP- | EVQLVESGGALVKPGGSLRLSCAA | QSVLTQPPSASGTPGQRVTISCSGSSS |
| | 101601 | SGFTFSKAWMSWVRQAPGKGLEWV | NIGSSSVSWYQQLPGTAPKLLIYKNNQ |
| | | GRIKSVTDGETTDYAAPVKGRFTI | RPSGVPDRFSGSKSGTSASLAISGLRS |
| | | SRDDSKSTLYLQMNSLKTEDTAVY | EDEADYYCSTWDDSLSVRVFGGGTKLT |
| | | YCTSSFCCRGGSCPSHDTSYCGGY | VL (SEQ ID NO: 1588) |
| | | YKSYYYMDVWGKGTTVTVSS | |
| | | (SEQ ID NO: 1394) | |
| 63 | AIP- | EVQLVESGGALVKPGGSLRLSCAA | QSVLTQPPSASGTPGQRVTISCSGSSS |
| | 159023 | SGFTFSKAWMSWVRQAPGKGLEWV | NIGSSSVSWYQQLPGTAPKLLIYKNNQ |
| | | GRIKSVTDGETTDYAAPVKGRFTI | RPSGVPDRFSGSKSGTSASLAISGLRS |
| | | SRDDSKSTLYLQMNSLKTEDTAVY | EDEADYYCSTWDDSLSVRVFGGGTKLT |
| | | YCTSSFCCRGGSCPSHDTSYCGGQ | VL (SEQ ID NO: 1589) |
| | | FKSYYYMDVWGKGTTVTVSS | |
| | | (SEQ ID NO: 1395) | |
| 64 | AIP- | EVQLVESGGALVKPGGSLRLSCAA | QSVLTQPPSASGTPGQRVTISCSGSSS |
| | 146871 | SGFTFSKAWMSWVRQAPGKGLEWV | NIGSSSVSWYQQLPGTAPKLLIYKNNQ |
| | | GRIKSVTDGETTDYAAPVKGRFTI | RPSGVPDRFSGSKSGTSASLAISGLRS |
| | | SRDDSKSTLYLQMNSLKTEDTAVY | EDEADYYCSTWDDSLSVRVFGGGTKLT |
| | | YCTSSFCCRGGSCPSHDTSYCGGQ | VL (SEQ ID NO: 1590) |
| | | YPSYYYMDVWGKGTTVTVSS | |
| | | (SEQ ID NO: 1396) | |
| 65 | AIP- | EVQLVESGGALVKPGGSLRLSCAA | QSVLTQPPSASGTPGQRVTISCSGSSS |
| | 170053 | SGFTFSKAWMSWVRQAPGKGLEWV | NIGSSSVSWYQQLPGTAPKLLIYKNNQ |
| | | GRIKSVTDGETTDYAAPVKGRFTI | RPSGVPDRFSGSKSGTSASLAISGLRS |
| | | SRDDSKSTLYLQMNSLKTEDTAVY | EDEADYYCSTWDDSLSVRVFGGGTKLT |
| | | YCTSSFCCRGGSCPSHDTSYCGGQ | VL (SEQ ID NO: 1591) |
| | | YASYYYMDVWGKGTTVTVSS | |
| | | (SEQ ID NO: 1397) | |
| 66 | AIP- | EVQLVESGGALVKPGGSLRLSCAA | QSVLTQPPSASGTPGQRVTISCSGSSS |
| | 199483 | SGFTFSKAWMSWVRQAPGKGLEWV | NIGSSSVSWYQQLPGTAPKLLIYKNNQ |
| | | GRIKSVTDGETTDYAAPVKGRFTI | RPSGVPDRFSGSKSGTSASLAISGLRS |
| | | SRDDSKSTLYLQMNSLKTEDTAVY | EDEADYYCSTWDDSLSVRVFGGGTKLT |
| | | YCTSSFCCRGGSCPSHDTSYCGGQ | VL (SEQ ID NO: 1592) |
| | | YQSYYYMDVWGKGTTVTVSS | |
| | | (SEQ ID NO: 1398) | |
| 67 | AIP- | EVQLVESGGALVKPGGSLRLSCAA | QSVLTQPPSASGTPGQRVTISCSGSSS |
| | 161048 | SGFTFSKAWMSWVRQAPGKGLEWV | NIGSSSVSWYQQLPGTAPKLLIYKNNQ |
| | | GRIKSVTDGETTDYAAPVKGRFTI | RPSGVPDRFSGSKSGTSASLAISGLRS |
| | | SRDDSKSTLYLQMNSLKTEDTAVY | EDEADYYCSTWDDSLSVRVFGGGTKLT |
| | | YCTSSFCCRGGSCPSHDTSYCGGQ | VL (SEQ ID NO: 1593) |
| | | YKDYYYMDVWGKGTTVTVSS | |
| | | (SEQ ID NO: 1399) | |
| 68 | AIP- | EVQLVESGGALVKPGGSLRLSCAA | QSVLTQPPSASGTPGQRVTISCSGSSS |
| | 162041 | SGFTFSKAWMSWVRQAPGKGLEWV | NIGSSSVSWYQQLPGTAPKLLIYKNNQ |
| | | GRIKSVTDGETTDYAAPVKGRFTI | RPSGVPDRFSGSKSGTSASLAISGLRS |
| | | SRDDSKSTLYLQMNSLKTEDTAVY | EDEADYYCSTWDDSLSVRVFGGGTKLT |
| | | YCTSSFCCRGGSCPSHDTSYCGGQ | VL (SEQ ID NO: 1594) |
| | | YKSFYYMDVWGKGTTVTVSS | |
| | | (SEQ ID NO: 1400) | |
| 69 | AIP- | EVQLVESGGALVKPGGSLRLSCAA | QSVLTQPPSASGTPGQRVTISCSGSSS |
| | 197886 | SGFTFSKAWMSWVRQAPGKGLEWV | NIGSSSVSWYQQLPGTAPKLLIYKNNQ |
| | | GRIKSVTDGETTDYAAPVKGRFTI | RPSGVPDRFSGSKSGTSASLAISGLRS |
| | | SRDDSKSTLYLQMNSLKTEDTAVY | EDEADYYCSTWDDSLSVRVFGGGTKLT |
| | | YCTSSFCCRGGSCPSHDTSYCGGQ | VL (SEQ ID NO: 1595) |
| | | YKSYFYMDVWGKGTTVTVSS | |
| | | (SEQ ID NO: 1401) | |
| 70 | AIP- | EVQLVESGGALVKPGGSLRLSCAA | QSVLTQPPSASGTPGQRVTISCSGSSS |
| | 183133 | SGFTFSKAWMSWVRQAPGKGLEWV | NIGSSSVSWYQQLPGTAPKLLIYKNNQ |
| | | GRIKSVTDGETTDYAAPVKGRFTI | RPSGVPDRFSGSKSGTSASLAISGLRS |
| | | SRDDSKSTLYLQMNSLKTEDTAVY | EDEADYYCSTWDDSLSVRVFGGGTKLT |
| | | YCTSSFCCRGGSCPSHDTSYCGGQ | VL (SEQ ID NO: 1596) |
| | | YKSYYWMDVWGKGTTVTVSS | |
| | | (SEQ ID NO: 1402) | |
| 71 | AIP- | EVQLVESGGALVKPGGSLRLSCAA | QSVLTQPPSASGTPGQRVTISCSGSSS |
| | 191470 | SGFTFSKAWMSWVRQAPGKGLEWV | NIGSSSVSWYQQLPGTAPKLLIYKNNQ |
| | | GRIKSVTDGETTDYAAPVKGRFTI | RPSGVPDRFSGSKSGTSASLAISGLRS |
| | | SRDDSKSTLYLQMNSLKTEDTAVY | EDEADYYCSTWDDSLSVRVFGGGTKLT |
| | | YCTSSFCCRGGSCPSHDTSYCGGQ | VL (SEQ ID NO: 1597) |
| | | YKSYYLMDVWGKGTTVTVSS | |
| | | (SEQ ID NO: 1403) | |
| 72 | AIP- | EVQLVESGGALVKPGGSLRLSCAA | QSVLTQPPSASGTPGQRVTISCSGSSS |
| | 151167 | SGFTFSKAWMSWVRQAPGKGLEWV | NIGSSSVSWYQQLPGTAPKLLIYKNNQ |
| | | GRIKSVTDGETTDYAAPVKGRFTI | RPSGVPDRFSGSKSGTSASLAISGLRS |
| | | SRDDSKSTLYLQMNSLKTEDTAVY | EDEADYYCSTWDDSLSVRVFGGGTKLT |
| | | YCTSSFCCRGGSCPSHDTSYCGGQ | VL (SEQ ID NO: 1598) |
| | | YKSYYYVDVWGKGTTVTVSS | |
| | | (SEQ ID NO: 1404) | |
| 73 | AIP- | EVQLVESGGALVKPGGSLRLSCAA | QSVLTQPPSASGTPGQRVTISCSGSSS |
| | 106633 | SGFTFSKAWMSWVRQAPGKGLEWV | NIGSSSVSWYQQLPGTAPKLLIYKNNQ |
| | | GRIKSVTDGETTDYAAPVKGRFTI | RPSGVPDRFSGSKSGTSASLAISGLRS |
| | | SRDDSKSTLYLQMNSLKTEDTAVY | EDEADYYCSTWDDSLSVRVFGGGTKLT |
| | | YCTSSFCCRGGSCPSHDTSYCGGQ | VL (SEQ ID NO: 1599) |
| | | YKSYYYFDVWGKGTTVTVSS | |
| | | (SEQ ID NO: 1405) | |
| 74 | AIP- | EVQLVESGGALVKPGGSLRLSCAA | QSVLTQPPSASGTPGQRVTISCSGSSS |
| | 102624 | SGFTFSKAWMSWVRQAPGKGLEWV | NIGSSSVSWYQQLPGTAPKLLIYKNNQ |
| | | GRIKSVTDGETTDYAAPVKGRFTI | RPSGVPDRFSGSKSGTSASLAISGLRS |
| | | SRDDSKSTLYLQMNSLKTEDTAVY | EDEADYYCSTWDDSLSVRVFGGGTKLT |
| | | YCTSSFCCRGGSCPSHDTSYCGGQ | VL (SEQ ID NO: 1600) |
| | | YKSYYYMNVWGKGTTVTVSS | |
| | | (SEQ ID NO: 1406) | |
| 75 | AIP- | EVQLVESGGALVKPGGSLRLSCAA | QSVLTQPPSASGTPGQRVTISCSGSSS |
| | 109484 | SGFTFSKAWMSWVRQAPGKGLEWV | NIGSSSVSWYQQLPGTAPKLLIYKNNQ |
| | | GRIKSVTDGETTDYAAPVKGRFTI | RPSGVPDRFSGSKSGTSASLAISGLRS |
| | | SRDDSKSTLYLQMNSLKTEDTAVY | EDEADYYCSTWDDSLSVRVFGGGTKLT |
| | | YCTSSFCCRGGSCPSHDTSYCGGQ | VL (SEQ ID NO: 1601) |
| | | YKSYYYMDIWGKGTTVTVSS | |
| | | (SEQ ID NO: 1407) | |
| 76 | AIP- | EVQLVESGGALVKPGGSLRLSCAA | QSVLTQPPSASGTPGQRVTISCSGSSS |
| | 164754 | SGFTFSKAWMSWVRQAPGKGLEWV | NIGSSSVSWYQQLPGTAPKLLIYKNNQ |
| | | GRIKSVTDGETTDYAAPVKGRFTI | RPSGVPDRFSGSKSGTSASLAISGLRS |
| | | SRDDSKSTLYLQMNSLKTEDTAVY | EDEADYYCSTWDDSLSVRVFGGGTKLT |
| | | YCTSSFCCRGGSCPSHDTSYCGGQ | VL (SEQ ID NO: 1602) |
| | | YKSYYYMDPWGKGTTVTVSS | |
| | | (SEQ ID NO: 1408) | |
| 77 | AIP- | EVQLVESGGALVKPGGSLRLSCAA | QSVLTQPPSASGTPGQRVTISCSGSSS |
| | 169676 | SGFTFSKAWMSWVRQAPGKGLEWV | NIGSSSVSWYQQLPGTAPKLLIYKNNQ |
| | | GRIKSVTDGETTDYAAPVKGRFTI | RPSGVPDRFSGSKSGTSASLAISGLRS |
| | | SRDDSKSTLYLQMNSLKTEDTAVY | EDEADYYCSTWDDSLSVRVFGGGTKLT |
| | | YCTSSFCCRGGSCPSHDTSYCGGQ | VL (SEQ ID NO: 1603) |
| | | FKDYYYMDVWGKGTTVTVSS | |
| | | (SEQ ID NO: 1409) | |
| 78 | AIP- | EVQLVESGGALVKPGGSLRLSCAA | QSVLTQPPSASGTPGQRVTISCSGSSS |
| | 177584 | SGFTFSKAWMSWVRQAPGKGLEWV | NIGSSSVSWYQQLPGTAPKLLIYKNNQ |
| | | GRIKSVTDGETTDYAAPVKGRFTI | RPSGVPDRFSGSKSGTSASLAISGLRS |
| | | SRDDSKSTLYLQMNSLKTEDTAVY | EDEADYYCSTWDDSLSVRVFGGGTKLT |
| | | YCTSSFCCRGGSCPSHDTSYCGGQ | VL (SEQ ID NO: 1604) |
| | | SKQYYYMDVWGKGTTVIVSS | |
| | | (SEQ ID NO: 1410) | |
| 79 | AIP- | EVQLVESGGALVKPGGSLRLSCAA | QSVLTQPPSASGTPGQRVTISCSGSSS |
| | 174676 | SGFTFSKAWMSWVRQAPGKGLEWV | NIGSSSVSWYQQLPGTAPKLLIYKNNQ |
| | | GRIKSVTDGETTDYAAPVKGRFTI | RPSGVPDRFSGSKSGTSASLAISGLRS |
| | | SRDDSKSTLYLQMNSLKTEDTAVY | EDEADYYCSTWDDSLSVRVFGGGTKLT |
| | | YCTSSFCCRGGSCPSHDTSYCGGQ | VL (SEQ ID NO: 1605) |
| | | SKKYYYMDVWGKGTTVTVSS | |
| | | (SEQ ID NO: 1411) | |
| 80 | AIP- | EVQLVESGGALVKPGGSLRLSCAA | QSVLTQPPSASGTPGQRVTISCSGSSS |
| | 120546 | SGFTFSKAWMSWVRQAPGKGLEWV | NIGSSSVSWYQQLPGTAPKLLIYKNNQ |
| | | GRIKSVTDGETTDYAAPVKGRFTI | RPSGVPDRFSGSKSGTSASLAISGLRS |
| | | SRDDSKSTLYLQMNSLKTEDTAVY | EDEADYYCSTWDDSLSVRVFGGGTKLT |
| | | YCTSSFSCRGGSCPSHDTSYSGGQ | VL (SEQ ID NO: 1606) |
| | | YKSYYYMDVWGKGTTVTVSS | |
| | | (SEQ ID NO: 1412) | |
| 81 | AIP- | EVQLVESGGALVKPGGSLRLSCAA | QSVLTQPPSASGTPGQRVTISCSGSSS |
| | 186435 | SGFTFSKAWMSWVRQAPGKGLEWV | NIGSSSVSWYQQLPGTAPKLLIYKNNQ |
| | | GRIKSVTDGETTDYAAPVKGRFTI | RPSGVPDRFSGSKSGTSASLAISGLRS |
| | | SRDDSKSTLYLQMNSLKTEDTAVY | EDEADYYCSTWDDSLSVRVFGGGTKLT |
| | | YCTSSFACRGGSCPSHDTSYVGGQ | VL (SEQ ID NO: 1607) |
| | | YKSYYYMDVWGKGTTVTVSS | |
| | | (SEQ ID NO: 1413) | |
| 82 | AIP- | EVQLVESGGALVKPGGSLRLSCAA | QSVLTQPPSASGTPGQRVTISCSGSSS |
| | 171074 | SGFTFSKAWMSWVRQAPGKGLEWV | NIGSSSVSWYQQLPGTAPKLLIYKNNQ |
| | | GRIKSVTDGETTDYAAPVKGRFTI | RPSGVPDRFSGSKSGTSASLAISGLRS |
| | | SRDDSKSTLYLQMNSLKTEDTAVY | EDEADYYCSTWDDSLSVRVFGGGTKLT |
| | | YCTSSFCCRGNSCPAHDTSYCGGQ | VL (SEQ ID NO: 1608) |
| | | YPSYYYMDVWGKGTTVTVSS | |
| | | (SEQ ID NO: 1414) | |
| 83 | AIP- | EVQLVESGGALVKPGGSLRLSCAA | QSVLTQPPSASGTPGQRVTISCSGSSS |
| | 163039 | SGFTFSKAWMSWVRQAPGKGLEWV | NIGSSSVSWYQQLPGTAPKLLIYKNNQ |
| | | GRIKSVTDGETTDYAAPVKGRFTI | RPSGVPDRFSGSKSGTSASLAISGLRS |
| | | SRDDSKSTLYLQMNSLKTEDTAVY | EDEADYYCSTWDDSLSVRVFGGGTKLT |
| | | YCTSSYCCLGGSCPSHDTSYCGGS | VL (SEQ ID NO: 1609) |
| | | YKSYYYMDVWGKGTTVTVSS | |
| | | (SEQ ID NO: 1415) | |
| 84 | AIP- | EVQLVESGGALVKPGGSLRLSCAA | QSVLTQPPSASGTPGQRVTISCSGSSS |
| | 147652 | SGFTFSKAWMSWVRQAPGKGLEWV | NIGSSSVSWYQQLPGTAPKLLIYKNNQ |
| | | GRIKSVTDGETTDYAAPVKGRFTI | RPSGVPDRFSGSKSGTSASLAISGLRS |
| | | SRDDSKSTLYLQMNSLKTEDTAVY | EDEADYYCSTWDDSLSVRVFGGGTKLT |
| | | YCTSSFCCRGKSCPSHDNSYCGGQ | VL (SEQ ID NO: 1610) |
| | | YASYYYMDVWGKGTTVTVSS | |
| | | (SEQ ID NO: 1416) | |
| 85 | AIP- | EVQLVESGGALVKPGGSLRLSCAA | QSVLTQPPSASGTPGQRVTISCSGSSS |
| | 182061 | SGFTFSKAWMSWVRQAPGKGLEWV | NIGSSSVSWYQQLPGTAPKLLIYKNNQ |
| | | GRIKSVTDGETTDYAAPVKGRFTI | RPSGVPDRFSGSKSGTSASLAISGLRS |
| | | SRDDSKSTLYLQMNSLKTEDTAVY | EDEADYYCSTWDDSLSVRVFGGGTKLT |
| | | YCTSSYCCRGGSCPSHDTSYCGGQ | VL (SEQ ID NO: 1611) |
| | | FKSYYYMDPWGKGTTVTVSS | |
| | | (SEQ ID NO: 1417) | |
| 86 | AIP- | EVQLVESGGALVKPGGSLRLSCAA | QSVLTQPPSASGTPGQRVTISCSGSSS |
| | 172643 | SGFTFSKAWMSWVRQAPGKGLEWV | NIGSSSVSWYQQLPGTAPKLLIYKNNQ |
| | | GRIKSVTDGETTDYAAPVKGRFTI | RPSGVPDRFSGSKSGTSASLAISGLRS |
| | | SRDDSKSTLYLQMNSLKTEDTAVY | EDEADYYCSTWDDSLSVRVFGGGTKLT |
| | | YCTSTFCCRGGSCLSHDTSYCGGQ | VL (SEQ ID NO: 1612) |
| | | YKSYYWMDVWGKGTTVIVSS | |
| | | (SEQ ID NO: 1418) | |
| 87 | AIP- | EVQLVESGGALVKPGGSLRLSCAA | QSVLTQPPSASGTPGQRVTISCTGSSS |
| | 171912 | SGFDFSKAWMSWVRQAPGKGLEWV | NIGSSSVSWYQQLPGTAPKLLIYKNNQ |
| | | GRIKSVTDGQTTDYAAPVKGRFTI | RPSGVPDRFSGSKSGTSASLAISGLRS |
| | | SRDDSKSTLYLQMNSLKTEDTAVY | EDEADYYCSTWDDSLSVRVFGGGTKLT |
| | | YCTSSFCCRGGSCPSHDTSYCGGQ | VL (SEQ ID NO: 1613) |
| | | YKSYYYMDVWGKGTTVTVSS | |
| | | (SEQ ID NO: 1419) | |
| 88 | AIP- | EVQLVESGGALVKPGGSLRLSCAA | QSVLTQPPSASGTPGQRVTISCSGSST |
| | 167833 | SGFTFAKAWMSWVRQAPGKGLEWV | NIGSSSVSWYQQLPGTAPKLLIYKNNY |
| | | GRIKSVTDGETTDYAAPVKGRFTI | RPSGVPDRFSGSKSGTSASLAISGLRS |
| | | SRDDSKSTLYLQMNSLKTEDTAVY | EDEADYYCSTWDDSLSVRVFGGGTKLT |
| | | YCTSSFCCRGGSCPSHDTSYCGGQ | VL (SEQ ID NO: 1614) |
| | | YKSYYYMDVWGKGTTVTVSS | |
| | | (SEQ ID NO: 1420) | |
| 89 | AIP- | EVQLVESGGALVKPGGSLRLSCAA | QSVLTQPPSASGTPGQRVTISCSGSSS |
| | 145518 | SGFDASKAWFTWVRQAPGKGLEWV | NIGSSSVSWYQQLPGTAPKLLIYKNNQ |
| | | GRIKSVTDGETTDYAAPVKGRFTI | RPSGVPDRFSGSKSGTSASLAISGLRS |
| | | SRDDSKSTLYLQMNSLKTEDTAVY | EDEADYYCSTWDDSLSVRVFGGGTKLT |
| | | YCTSSFCCRGGSCPSHDTSYCGGQ | VL (SEQ ID NO: 1615) |
| | | YKSYYYMDVWGKGTTVTVSS | |
| | | (SEQ ID NO: 1421) | |
| 90 | AIP- | EVQLVESGGALVKPGGSLRLSCAA | QSVLTQPPSASGTPGQRVTISCTGSSS |
| | 143155 | SGFTFSKAWMSWVRQAPGKGLEWV | NIGSSSVSWYQQLPGTAPKLLIYKNNQ |
| | | GRIKSVTDGETTDYAAPVKGRFTI | RPSGVPDRFSGSKSGTSASLAISGLRS |
| | | SRDDSKSTLYLQMNSLKTEDTAVY | EDEADYYCSTWDDSLSVRVFGGGTKLT |
| | | YCTSSFCCRGGSCPSHDTSYCGGQ | VL (SEQ ID NO: 1616) |
| | | YKSYYYMDVWGKGTTVTVSS | |
| | | (SEQ ID NO: 1422) | |
| 91 | AIP- | EVQLVESGGALVKPGGSLRLSCAA | QSVLTQPPSASGTPGQRVTISCSGASS |
| | 119664 | SGFTFSKAWMSWVRQAPGKGLEWV | NIGSSSVSWYQQLPGTAPKLLIYKNNQ |
| | | GRIKSVTDGETTDYAAPVKGRFTI | RPSGVPDRFSGSKSGTSASLAISGLRS |
| | | SRDDSKSTLYLQMNSLKTEDTAVY | EDEADYYCSTWDDSLSVRVFGGGTKLT |
| | | YCTSSFCCRGGSCPSHDTSYCGGQ | VL (SEQ ID NO: 1617) |
| | | YKSYYYMDVWGKGTTVTVSS | |
| | | (SEQ ID NO: 1423) | |
| 92 | AIP- | EVQLVESGGALVKPGGSLRLSCAA | QSVLTQPPSASGTPGQRVTISCSGSPS |
| | 190526 | SGFTFSKAWMSWVRQAPGKGLEWV | NIGSSSVSWYQQLPGTAPKLLIYKNNQ |
| | | GRIKSVTDGETTDYAAPVKGRFTI | RPSGVPDRFSGSKSGTSASLAISGLRS |
| | | SRDDSKSTLYLQMNSLKTEDTAVY | EDEADYYCSTWDDSLSVRVFGGGTKLT |
| | | YCTSSFCCRGGSCPSHDTSYCGGQ | VL (SEQ ID NO: 1618) |
| | | YKSYYYMDVWGKGTTVTVSS | |
| | | (SEQ ID NO: 1424) | |
| 93 | AIP- | EVQLVESGGALVKPGGSLRLSCAA | QSVLTQPPSASGTPGQRVTISCSGSKS |
| | 114403 | SGFTFSKAWMSWVRQAPGKGLEWV | NIGSSSVSWYQQLPGTAPKLLIYKNNQ |
| | | GRIKSVTDGETTDYAAPVKGRFTI | RPSGVPDRFSGSKSGTSASLAISGLRS |
| | | SRDDSKSTLYLQMNSLKTEDTAVY | EDEADYYCSTWDDSLSVRVFGGGTKLT |
| | | YCTSSFCCRGGSCPSHDTSYCGGQ | VL (SEQ ID NO: 1619) |
| | | YKSYYYMDVWGKGTTVTVSS | |
| | | (SEQ ID NO: 1425) | |
| 94 | AIP- | EVQLVESGGALVKPGGSLRLSCAA | QSVLTQPPSASGTPGQRVTISCSGSST |
| | 156760 | SGFTFSKAWMSWVRQAPGKGLEWV | NIGSSSVSWYQQLPGTAPKLLIYKNNQ |
| | | GRIKSVTDGETTDYAAPVKGRFTI | RPSGVPDRFSGSKSGTSASLAISGLRS |
| | | SRDDSKSTLYLQMNSLKTEDTAVY | EDEADYYCSTWDDSLSVRVFGGGTKLT |
| | | YCTSSFCCRGGSCPSHDTSYCGGQ | VL (SEQ ID NO: 1620) |
| | | YKSYYYMDVWGKGTTVTVSS | |
| | | (SEQ ID NO: 1426) | |
| 95 | AIP- | EVQLVESGGALVKPGGSLRLSCAA | QSVLTQPPSASGTPGQRVTISCSGSSS |
| | 103803 | SGFTFSKAWMSWVRQAPGKGLEWV | DIGSSSVSWYQQLPGTAPKLLIYKNNQ |
| | | GRIKSVTDGETTDYAAPVKGRFTI | RPSGVPDRFSGSKSGTSASLAISGLRS |
| | | SRDDSKSTLYLQMNSLKTEDTAVY | EDEADYYCSTWDDSLSVRVFGGGTKLT |
| | | YCTSSFCCRGGSCPSHDTSYCGGQ | VL (SEQ ID NO: 1621) |
| | | YKSYYYMDVWGKGTTVTVSS | |
| | | (SEQ ID NO: 1427) | |
| 96 | AIP- | EVQLVESGGALVKPGGSLRLSCAA | QSVLTQPPSASGTPGQRVTISCSGSSS |
| | 182722 | SGFTFSKAWMSWVRQAPGKGLEWV | NIQSSSVSWYQQLPGTAPKLLIYKNNQ |
| | | GRIKSVTDGETTDYAAPVKGRFTI | RPSGVPDRFSGSKSGTSASLAISGLRS |
| | | SRDDSKSTLYLQMNSLKTEDTAVY | EDEADYYCSTWDDSLSVRVFGGGTKLT |
| | | YCTSSFCCRGGSCPSHDTSYCGGQ | VL (SEQ ID NO: 1622) |
| | | YKSYYYMDVWGKGTTVTVSS | |
| | | (SEQ ID NO: 1428) | |
| 97 | AIP- | EVQLVESGGALVKPGGSLRLSCAA | QSVLTQPPSASGTPGQRVTISCSGSSS |
| | 195588 | SGFTFSKAWMSWVRQAPGKGLEWV | NIGHSSVSWYQQLPGTAPKLLIYKNNQ |
| | | GRIKSVTDGETTDYAAPVKGRFTI | RPSGVPDRFSGSKSGTSASLAISGLRS |
| | | SRDDSKSTLYLQMNSLKTEDTAVY | EDEADYYCSTWDDSLSVRVFGGGTKLT |
| | | YCTSSFCCRGGSCPSHDTSYCGGQ | VL (SEQ ID NO: 1623) |
| | | YKSYYYMDVWGKGTTVTVSS | |
| | | (SEQ ID NO: 1429) | |
| 98 | AIP- | EVQLVESGGALVKPGGSLRLSCAA | QSVLTQPPSASGTPGQRVTISCSGSSS |
| | 145722 | SGFTFSKAWMSWVRQAPGKGLEWV | NIGSTSVSWYQQLPGTAPKLLIYKNNQ |
| | | GRIKSVTDGETTDYAAPVKGRFTI | RPSGVPDRFSGSKSGTSASLAISGLRS |
| | | SRDDSKSTLYLQMNSLKTEDTAVY | EDEADYYCSTWDDSLSVRVFGGGTKLT |
| | | YCTSSFCCRGGSCPSHDTSYCGGQ | VL (SEQ ID NO: 1624) |
| | | YKSYYYMDVWGKGTTVTVSS | |
| | | (SEQ ID NO: 1430) | |
| 99 | AIP- | EVQLVESGGALVKPGGSLRLSCAA | QSVLTQPPSASGTPGQRVTISCSGSSS |
| | 178251 | SGFTFSKAWMSWVRQAPGKGLEWV | NIGSNSVSWYQQLPGTAPKLLIYKNNQ |
| | | GRIKSVTDGETTDYAAPVKGRFTI | RPSGVPDRFSGSKSGTSASLAISGLRS |
| | | SRDDSKSTLYLQMNSLKTEDTAVY | EDEADYYCSTWDDSLSVRVFGGGTKLT |
| | | YCTSSFCCRGGSCPSHDTSYCGGQ | VL (SEQ ID NO: 1625) |
| | | YKSYYYMDVWGKGTTVTVSS | |
| | | (SEQ ID NO: 1431) | |
| 100 | AIP- | EVQLVESGGALVKPGGSLRLSCAA | QSVLTQPPSASGTPGQRVTISCSGSSS |
| | 116142 | SGFTFSKAWMSWVRQAPGKGLEWV | NIGSASVSWYQQLPGTAPKLLIYKNNQ |
| | | GRIKSVTDGETTDYAAPVKGRFTI | RPSGVPDRFSGSKSGTSASLAISGLRS |
| | | SRDDSKSTLYLQMNSLKTEDTAVY | EDEADYYCSTWDDSLSVRVFGGGTKLT |
| | | YCTSSFCCRGGSCPSHDTSYCGGQ | VL (SEQ ID NO: 1626) |
| | | YKSYYYMDVWGKGTTVTVSS | |
| | | (SEQ ID NO: 1432) | |
| 101 | AIP- | EVQLVESGGALVKPGGSLRLSCAA | QSVLTQPPSASGTPGQRVTISCSGSSS |
| | 183350 | SGFTFSKAWMSWVRQAPGKGLEWV | NIGSSTVSWYQQLPGTAPKLLIYKNNQ |
| | | GRIKSVTDGETTDYAAPVKGRFTI | RPSGVPDRFSGSKSGTSASLAISGLRS |
| | | SRDDSKSTLYLQMNSLKTEDTAVY | EDEADYYCSTWDDSLSVRVFGGGTKLT |
| | | YCTSSFCCRGGSCPSHDTSYCGGQ | VL (SEQ ID NO: 1627) |
| | | YKSYYYMDVWGKGTTVTVSS | |
| | | (SEQ ID NO: 1433) | |
| 102 | AIP- | EVQLVESGGALVKPGGSLRLSCAA | QSVLTQPPSASGTPGQRVTISCSGSSS |
| | 127108 | SGFTFSKAWMSWVRQAPGKGLEWV | NIGSSAVSWYQQLPGTAPKLLIYKNNQ |
| | | GRIKSVTDGETTDYAAPVKGRFTI | RPSGVPDRFSGSKSGTSASLAISGLRS |
| | | SRDDSKSTLYLQMNSLKTEDTAVY | EDEADYYCSTWDDSLSVRVFGGGTKLT |
| | | YCTSSFCCRGGSCPSHDTSYCGGQ | VL (SEQ ID NO: 1628) |
| | | YKSYYYMDVWGKGTTVTVSS | |
| | | (SEQ ID NO: 1433) | |
| 103 | AIP- | EVQLVESGGALVKPGGSLRLSCAA | QSVLTQPPSASGTPGQRVTISCSGSSS |
| | 128147 | SGFTFSKAWMSWVRQAPGKGLEWV | NIGSSYVSWYQQLPGTAPKLLIYKNNQ |
| | | GRIKSVTDGETTDYAAPVKGRFTI | RPSGVPDRFSGSKSGTSASLAISGLRS |
| | | SRDDSKSTLYLQMNSLKTEDTAVY | EDEADYYCSTWDDSLSVRVFGGGTKLT |
| | | YCTSSFCCRGGSCPSHDTSYCGGQ | VL (SEQ ID NO: 1629) |
| | | YKSYYYMDVWGKGTTVTVSS | |
| | | (SEQ ID NO: 1435) | |
| 104 | AIP- | EVQLVESGGALVKPGGSLRLSCAA | QSVLTQPPSASGTPGQRVTISCSGSSS |
| | 109510 | SGFTFSKAWMSWVRQAPGKGLEWV | NIGSSSTSWYQQLPGTAPKLLIYKNNQ |
| | | GRIKSVTDGETTDYAAPVKGRFTI | RPSGVPDRFSGSKSGTSASLAISGLRS |
| | | SRDDSKSTLYLQMNSLKTEDTAVY | EDEADYYCSTWDDSLSVRVFGGGTKLT |
| | | YCTSSFCCRGGSCPSHDTSYCGGQ | VL (SEQ ID NO: 1630) |
| | | YKSYYYMDVWGKGTTVTVSS | |
| | | (SEQ ID NO: 1436) | |
| 105 | AIP- | EVQLVESGGALVKPGGSLRLSCAA | QSVLTQPPSASGTPGQRVTISCSGSSS |
| | 104086 | SGFTFSKAWMSWVRQAPGKGLEWV | NIGSSSVAWYQQLPGTAPKLLIYKNNQ |
| | | GRIKSVTDGETTDYAAPVKGRFTI | RPSGVPDRFSGSKSGTSASLAISGLRS |
| | | SRDDSKSTLYLQMNSLKTEDTAVY | EDEADYYCSTWDDSLSVRVFGGGTKLT |
| | | YCTSSFCCRGGSCPSHDTSYCGGQ | VL (SEQ ID NO: 1631) |
| | | YKSYYYMDVWGKGTTVTVSS | |
| | | (SEQ ID NO: 1437) | |
| 106 | AIP- | EVQLVESGGALVKPGGSLRLSCAA | QSVLTQPPSASGTPGQRVTISCSGSSS |
| | 143132 | SGFTFSKAWMSWVRQAPGKGLEWV | NIGSSSVTWYQQLPGTAPKLLIYKNNQ |
| | | GRIKSVTDGETTDYAAPVKGRFTI | RPSGVPDRFSGSKSGTSASLAISGLRS |
| | | SRDDSKSTLYLQMNSLKTEDTAVY | EDEADYYCSTWDDSLSVRVFGGGTKLT |
| | | YCTSSFCCRGGSCPSHDTSYCGGQ | VL (SEQ ID NO: 1632) |
| | | YKSYYYMDVWGKGTTVTVSS | |
| | | (SEQ ID NO: 1438) | |
| 107 | AIP- | EVQLVESGGALVKPGGSLRLSCAA | QSVLTQPPSASGTPGQRVTISCSGSSS |
| | 169636 | SGFTFSKAWMSWVRQAPGKGLEWV | NIGSSSVSWYQQLPGTAPKLLIYRNNQ |
| | | GRIKSVTDGETTDYAAPVKGRFTI | RPSGVPDRFSGSKSGTSASLAISGLRS |
| | | SRDDSKSTLYLQMNSLKTEDTAVY | EDEADYYCSTWDDSLSVRVFGGGTKLT |
| | | YCTSSFCCRGGSCPSHDTSYCGGQ | VL (SEQ ID NO: 1633) |
| | | YKSYYYMDVWGKGTTVTVSS | |
| | | (SEQ ID NO: 1439) | |
| 108 | AIP- | EVQLVESGGALVKPGGSLRLSCAA | QSVLTQPPSASGTPGQRVTISCSGSSS |
| | 152243 | SGFTFSKAWMSWVRQAPGKGLEWV | NIGSSSVSWYQQLPGTAPKLLIYNNNQ |
| | | GRIKSVTDGETTDYAAPVKGRFTI | RPSGVPDRFSGSKSGTSASLAISGLRS |
| | | SRDDSKSTLYLQMNSLKTEDTAVY | EDEADYYCSTWDDSLSVRVFGGGTKLT |
| | | YCTSSFCCRGGSCPSHDTSYCGGQ | VL (SEQ ID NO: 1634) |
| | | YKSYYYMDVWGKGTTVTVSS | |
| | | (SEQ ID NO: 1440) | |
| 109 | AIP- | EVQLVESGGALVKPGGSLRLSCAA | QSVLTQPPSASGTPGQRVTISCSGSSS |
| | 138776 | SGFTFSKAWMSWVRQAPGKGLEWV | NIGSSSVSWYQQLPGTAPKLLIYMNNQ |
| | | GRIKSVTDGETTDYAAPVKGRFTI | RPSGVPDRFSGSKSGTSASLAISGLRS |
| | | SRDDSKSTLYLQMNSLKTEDTAVY | EDEADYYCSTWDDSLSVRVFGGGTKLT |
| | | YCTSSFCCRGGSCPSHDTSYCGGQ | VL (SEQ ID NO: 1635) |
| | | YKSYYYMDVWGKGTTVTVSS | |
| | | (SEQ ID NO: 1441) | |
| 110 | AIP- | EVQLVESGGALVKPGGSLRLSCAA | QSVLTQPPSASGTPGQRVTISCSGSSS |
| | 103817 | SGFTFSKAWMSWVRQAPGKGLEWV | NIGSSSVSWYQQLPGTAPKLLIYANNQ |
| | | GRIKSVTDGETTDYAAPVKGRFTI | RPSGVPDRFSGSKSGTSASLAISGLRS |
| | | SRDDSKSTLYLQMNSLKTEDTAVY | EDEADYYCSTWDDSLSVRVFGGGTKLT |
| | | YCTSSFCCRGGSCPSHDTSYCGGQ | VL (SEQ ID NO: 1636) |
| | | YKSYYYMDVWGKGTTVTVSS | |
| | | (SEQ ID NO: 1442) | |
| 111 | AIP- | EVQLVESGGALVKPGGSLRLSCAA | QSVLTQPPSASGTPGQRVTISCSGSSS |
| | 130491 | SGFTFSKAWMSWVRQAPGKGLEWV | NIGSSSVSWYQQLPGTAPKLLIYHNNQ |
| | | GRIKSVTDGETTDYAAPVKGRFTI | RPSGVPDRFSGSKSGTSASLAISGLRS |
| | | SRDDSKSTLYLQMNSLKTEDTAVY | EDEADYYCSTWDDSLSVRVFGGGTKLT |
| | | YCTSSFCCRGGSCPSHDTSYCGGQ | VL (SEQ ID NO: 1637) |
| | | YKSYYYMDVWGKGTTVTVSS | |
| | | (SEQ ID NO: 1443) | |
| 112 | AIP- | EVQLVESGGALVKPGGSLRLSCAA | QSVLTQPPSASGTPGQRVTISCSGSSS |
| | 188155 | SGFTFSKAWMSWVRQAPGKGLEWV | NIGSSSVSWYQQLPGTAPKLLIYKDNQ |
| | | GRIKSVTDGETTDYAAPVKGRFTI | RPSGVPDRFSGSKSGTSASLAISGLRS |
| | | SRDDSKSTLYLQMNSLKTEDTAVY | EDEADYYCSTWDDSLSVRVFGGGTKLT |
| | | YCTSSFCCRGGSCPSHDTSYCGGQ | VL (SEQ ID NO: 1638) |
| | | YKSYYYMDVWGKGTTVTVSS | |
| | | (SEQ ID NO: 1444) | |
| 113 | AIP- | EVQLVESGGALVKPGGSLRLSCAA | QSVLTQPPSASGTPGQRVTISCSGSSS |
| | 167246 | SGFTFSKAWMSWVRQAPGKGLEWV | NIGSSSVSWYQQLPGTAPKLLIYKNTQ |
| | | GRIKSVTDGETTDYAAPVKGRFTI | RPSGVPDRFSGSKSGTSASLAISGLRS |
| | | SRDDSKSTLYLQMNSLKTEDTAVY | EDEADYYCSTWDDSLSVRVFGGGTKLT |
| | | YCTSSFCCRGGSCPSHDTSYCGGQ | VL (SEQ ID NO: 1639) |
| | | YKSYYYMDVWGKGTTVTVSS | |
| | | (SEQ ID NO: 1445) | |
| 114 | AIP- | EVQLVESGGALVKPGGSLRLSCAA | QSVLTQPPSASGTPGQRVTISCSGSSS |
| | 106139 | SGFTFSKAWMSWVRQAPGKGLEWV | NIGSSSVSWYQQLPGTAPKLLIYKNNY |
| | | GRIKSVTDGETTDYAAPVKGRFTI | RPSGVPDRFSGSKSGTSASLAISGLRS |
| | | SRDDSKSTLYLQMNSLKTEDTAVY | EDEADYYCSTWDDSLSVRVFGGGTKLT |
| | | YCTSSFCCRGGSCPSHDTSYCGGQ | VL (SEQ ID NO: 1640) |
| | | YKSYYYMDVWGKGTTVTVSS | |
| | | (SEQ ID NO: 1446) | |
| 115 | AIP- | EVQLVESGGALVKPGGSLRLSCAA | QSVLTQPPSASGTPGQRVTISCSGSSS |
| | 198351 | SGFTFSKAWMSWVRQAPGKGLEWV | NIGSSSVSWYQQLPGTAPKLLIYKNNA |
| | | GRIKSVTDGETTDYAAPVKGRFTI | RPSGVPDRFSGSKSGTSASLAISGLRS |
| | | SRDDSKSTLYLQMNSLKTEDTAVY | EDEADYYCSTWDDSLSVRVFGGGTKLT |
| | | YCTSSFCCRGGSCPSHDTSYCGGQ | VL (SEQ ID NO: 1641) |
| | | YKSYYYMDVWGKGTTVTVSS | |
| | | (SEQ ID NO: 1447) | |
| 116 | AIP- | EVQLVESGGALVKPGGSLRLSCAA | QSVLTQPPSASGTPGQRVTISCSGSSS |
| | 159326 | SGFTFSKAWMSWVRQAPGKGLEWV | NIGSSSVSWYQQLPGTAPKLLIYKNNL |
| | | GRIKSVTDGETTDYAAPVKGRFTI | RPSGVPDRFSGSKSGTSASLAISGLRS |
| | | SRDDSKSTLYLQMNSLKTEDTAVY | EDEADYYCSTWDDSLSVRVFGGGTKLT |
| | | YCTSSFCCRGGSCPSHDTSYCGGQ | VL (SEQ ID NO: 1642) |
| | | YKSYYYMDVWGKGTTVTVSS | |
| | | (SEQ ID NO: 1448) | |
| 117 | AIP- | EVQLVESGGALVKPGGSLRLSCAA | QSVLTQPPSASGTPGQRVTISCSGSSS |
| | 192275 | SGFTFSKAWMSWVRQAPGKGLEWV | NIGSSSVSWYQQLPGTAPKLLIYKNNQ |
| | | GRIKSVTDGETTDYAAPVKGRFTI | QPSGVPDRFSGSKSGTSASLAISGLRS |
| | | SRDDSKSTLYLQMNSLKTEDTAVY | EDEADYYCSTWDDSLSVRVFGGGTKLT |
| | | YCTSSFCCRGGSCPSHDTSYCGGQ | VL (SEQ ID NO: 1643) |
| | | YKSYYYMDVWGKGTTVTVSS | |
| | | (SEQ ID NO: 1449) | |
| 118 | AIP- | EVQLVESGGALVKPGGSLRLSCAA | QSVLTQPPSASGTPGQRVTISCSGSSS |
| | 190761 | SGFTFSKAWMSWVRQAPGKGLEWV | NIGSSSVSWYQQLPGTAPKLLIYKNNQ |
| | | GRIKSVTDGETTDYAAPVKGRFTI | RASGVPDRFSGSKSGTSASLAISGLRS |
| | | SRDDSKSTLYLQMNSLKTEDTAVY | EDEADYYCSTWDDSLSVRVFGGGTKLT |
| | | YCTSSFCCRGGSCPSHDTSYCGGQ | VL (SEQ ID NO: 1644) |
| | | YKSYYYMDVWGKGTTVTVSS | |
| | | (SEQ ID NO: 1450) | |
| 119 | AIP- | EVQLVESGGALVKPGGSLRLSCAA | QSVLTQPPSASGTPGQRVTISCSGSSS |
| | 166832 | SGFTFSKAWMSWVRQAPGKGLEWV | NIGSSSVSWYQQLPGTAPKLLIYKNNQ |
| | | GRIKSVTDGETTDYAAPVKGRFTI | RPYGVPDRFSGSKSGTSASLAISGLRS |
| | | SRDDSKSTLYLQMNSLKTEDTAVY | EDEADYYCSTWDDSLSVRVFGGGTKLT |
| | | YCTSSFCCRGGSCPSHDTSYCGGQ | VL (SEQ ID NO: 1645) |
| | | YKSYYYMDVWGKGTTVTVSS | |
| | | (SEQ ID NO: 1451) | |
| 120 | AIP- | EVQLVESGGALVKPGGSLRLSCAA | QSVLTQPPSASGTPGQRVTISCSGSSS |
| | 148062 | SGFTFSKAWMSWVRQAPGKGLEWV | NIGSSSVSWYQQLPGTAPKLLIYKNNQ |
| | | GRIKSVTDGETTDYAAPVKGRFTI | RPLGVPDRFSGSKSGTSASLAISGLRS |
| | | SRDDSKSTLYLQMNSLKTEDTAVY | EDEADYYCSTWDDSLSVRVFGGGTKLT |
| | | YCTSSFCCRGGSCPSHDTSYCGGQ | VL (SEQ ID NO: 1646) |
| | | YKSYYYMDVWGKGTTVTVSS | |
| | | (SEQ ID NO: 1452) | |
| 121 | AIP- | EVQLVESGGALVKPGGSLRLSCAA | QSVLTQPPSASGTPGQRVTISCSGSSS |
| | 129145 | SGFTFSKAWMSWVRQAPGKGLEWV | NIGSSSVSWYQQLPGTAPKLLIYKNNQ |
| | | GRIKSVTDGETTDYAAPVKGRFTI | RPSGVPDRFSGSKSGTSASLAISGLRS |
| | | SRDDSKSTLYLQMNSLKTEDTAVY | EDEADYYCATWDDSLSVRVFGGGTKLT |
| | | YCTSSFCCRGGSCPSHDTSYCGGQ | VL (SEQ ID NO: 1647) |
| | | YKSYYYMDVWGKGTTVTVSS | |
| | | (SEQ ID NO: 1453) | |
| 122 | AIP- | EVQLVESGGALVKPGGSLRLSCAA | QSVLTQPPSASGTPGQRVTISCSGSSS |
| | 111240 | SGFTFSKAWMSWVRQAPGKGLEWV | NIGSSSVSWYQQLPGTAPKLLIYKNNQ |
| | | GRIKSVTDGETTDYAAPVKGRFTI | RPSGVPDRFSGSKSGTSASLAISGLRS |
| | | SRDDSKSTLYLQMNSLKTEDTAVY | EDEADYYCSSWDDSLSVRVFGGGTKLT |
| | | YCTSSFCCRGGSCPSHDTSYCGGQ | VL (SEQ ID NO: 1648) |
| | | YKSYYYMDVWGKGTTVTVSS | |
| | | (SEQ ID NO: 1454) | |
| 123 | AIP- | EVQLVESGGALVKPGGSLRLSCAA | QSVLTQPPSASGTPGQRVTISCSGSSS |
| | 190749 | SGFTFSKAWMSWVRQAPGKGLEWV | NIGSSSVSWYQQLPGTAPKLLIYKNNQ |
| | | GRIKSVTDGETTDYAAPVKGRFTI | RPSGVPDRFSGSKSGTSASLAISGLRS |
| | | SRDDSKSTLYLQMNSLKTEDTAVY | EDEADYYCSTFDDSLSVRVFGGGTKLT |
| | | YCTSSFCCRGGSCPSHDTSYCGGQ | VL (SEQ ID NO: 1649) |
| | | YKSYYYMDVWGKGTTVTVSS | |
| | | (SEQ ID NO: 1455) | |
| 124 | AIP- | EVQLVESGGALVKPGGSLRLSCAA | QSVLTQPPSASGTPGQRVTISCSGSSS |
| | 153888 | SGFTFSKAWMSWVRQAPGKGLEWV | NIGSSSVSWYQQLPGTAPKLLIYKNNQ |
| | | GRIKSVTDGETTDYAAPVKGRFTI | RPSGVPDRFSGSKSGTSASLAISGLRS |
| | | SRDDSKSTLYLQMNSLKTEDTAVY | EDEADYYCSTWDNSLSVRVFGGGTKLT |
| | | YCTSSFCCRGGSCPSHDTSYCGGQ | VL (SEQ ID NO: 1650) |
| | | YKSYYYMDVWGKGTTVTVSS | |
| | | (SEQ ID NO: 1456) | |
| 125 | AIP- | EVQLVESGGALVKPGGSLRLSCAA | QSVLTQPPSASGTPGQRVTISCSGSSS |
| | 130915 | SGFTFSKAWMSWVRQAPGKGLEWV | NIGSSSVSWYQQLPGTAPKLLIYKNNQ |
| | | GRIKSVTDGETTDYAAPVKGRFTI | RPSGVPDRFSGSKSGTSASLAISGLRS |
| | | SRDDSKSTLYLQMNSLKTEDTAVY | EDEADYYCSTWDDQLSVRVFGGGTKLT |
| | | YCTSSFCCRGGSCPSHDTSYCGGQ | VL (SEQ ID NO: 1651) |
| | | YKSYYYMDVWGKGTTVTVSS | |
| | | (SEQ ID NO: 1457) | |
| 126 | AIP- | EVQLVESGGALVKPGGSLRLSCAA | QSVLTQPPSASGTPGQRVTISCSGSSS |
| | 109048 | SGFTFSKAWMSWVRQAPGKGLEWV | NIGSSSVSWYQQLPGTAPKLLIYKNNQ |
| | | GRIKSVTDGETTDYAAPVKGRFTI | RPSGVPDRFSGSKSGTSASLAISGLRS |
| | | SRDDSKSTLYLQMNSLKTEDTAVY | EDEADYYCSTWDDALSVRVFGGGTKLT |
| | | YCTSSFCCRGGSCPSHDTSYCGGQ | VL (SEQ ID NO: 1652) |
| | | YKSYYYMDVWGKGTTVTVSS | |
| | | (SEQ ID NO: 1458) | |
| 127 | AIP- | EVQLVESGGALVKPGGSLRLSCAA | QSVLTQPPSASGTPGQRVTISCSGSSS |
| | 170569 | SGFTFSKAWMSWVRQAPGKGLEWV | NIGSSSVSWYQQLPGTAPKLLIYKNNQ |
| | | GRIKSVTDGETTDYAAPVKGRFTI | RPSGVPDRFSGSKSGTSASLAISGLRS |
| | | SRDDSKSTLYLQMNSLKTEDTAVY | EDEADYYCSTWDDDLSVRVFGGGTKLT |
| | | YCTSSFCCRGGSCPSHDTSYCGGQ | VL (SEQ ID NO: 1653) |
| | | YKSYYYMDVWGKGTTVTVSS | |
| | | (SEQ ID NO: 1459) | |
| 128 | AIP- | EVQLVESGGALVKPGGSLRLSCAA | QSVLTQPPSASGTPGQRVTISCSGSSS |
| | 154873 | SGFTFSKAWMSWVRQAPGKGLEWV | NIGSSSVSWYQQLPGTAPKLLIYKNNQ |
| | | GRIKSVTDGETTDYAAPVKGRFTI | RPSGVPDRFSGSKSGTSASLAISGLRS |
| | | SRDDSKSTLYLQMNSLKTEDTAVY | EDEADYYCSTWDDSNSVRVFGGGTKLT |
| | | YCTSSFCCRGGSCPSHDTSYCGGQ | VL (SEQ ID NO: 1654) |
| | | YKSYYYMDVWGKGTTVTVSS | |
| | | (SEQ ID NO: 1460) | |
| 129 | AIP- | EVQLVESGGALVKPGGSLRLSCAA | QSVLTQPPSASGTPGQRVTISCSGSSS |
| | 159037 | SGFTFSKAWMSWVRQAPGKGLEWV | NIGSSSVSWYQQLPGTAPKLLIYKNNQ |
| | | GRIKSVTDGETTDYAAPVKGRFTI | RPSGVPDRFSGSKSGTSASLAISGLRS |
| | | SRDDSKSTLYLQMNSLKTEDTAVY | EDEADYYCSTWDDSSSVRVFGGGTKLT |
| | | YCTSSFCCRGGSCPSHDTSYCGGQ | VL (SEQ ID NO: 1655) |
| | | YKSYYYMDVWGKGTTVTVSS | |
| | | (SEQ ID NO: 1461) | |
| 130 | AIP- | EVQLVESGGALVKPGGSLRLSCAA | QSVLTQPPSASGTPGQRVTISCSGSSS |
| | 186826 | SGFTFSKAWMSWVRQAPGKGLEWV | NIGSSSVSWYQQLPGTAPKLLIYKNNQ |
| | | GRIKSVTDGETTDYAAPVKGRFTI | RPSGVPDRFSGSKSGTSASLAISGLRS |
| | | SRDDSKSTLYLQMNSLKTEDTAVY | EDEADYYCSTWDDSLNVRVFGGGTKLT |
| | | YCTSSFCCRGGSCPSHDTSYCGGQ | VL (SEQ ID NO: 1656) |
| | | YKSYYYMDVWGKGTTVTVSS | |
| | | (SEQ ID NO: 1462) | |
| 131 | AIP- | EVQLVESGGALVKPGGSLRLSCAA | QSVLTQPPSASGTPGQRVTISCSGSSS |
| | 156514 | SGFTFSKAWMSWVRQAPGKGLEWV | NIGSSSVSWYQQLPGTAPKLLIYKNNQ |
| | | GRIKSVTDGETTDYAAPVKGRFTI | RPSGVPDRFSGSKSGTSASLAISGLRS |
| | | SRDDSKSTLYLQMNSLKTEDTAVY | EDEADYYCSTWDDSLLVRVFGGGTKLT |
| | | YCTSSFCCRGGSCPSHDTSYCGGQ | VL (SEQ ID NO: 1657) |
| | | YKSYYYMDVWGKGTTVTVSS | |
| | | (SEQ ID NO: 1463) | |
| 132 | AIP- | EVQLVESGGALVKPGGSLRLSCAA | QSVLTQPPSASGTPGQRVTISCSGSSS |
| | 157122 | SGFTFSKAWMSWVRQAPGKGLEWV | NIGSSSVSWYQQLPGTAPKLLIYKNNQ |
| | | GRIKSVTDGETTDYAAPVKGRFTI | RPSGVPDRFSGSKSGTSASLAISGLRS |
| | | SRDDSKSTLYLQMNSLKTEDTAVY | EDEADYYCSTWDDSLTVRVFGGGTKLT |
| | | YCTSSFCCRGGSCPSHDTSYCGGQ | VL (SEQ ID NO: 1658) |
| | | YKSYYYMDVWGKGTTVTVSS | |
| | | (SEQ ID NO: 1464) | |
| 133 | AIP- | EVQLVESGGALVKPGGSLRLSCAA | QSVLTQPPSASGTPGQRVTISCSGSSS |
| | 173276 | SGFTFSKAWMSWVRQAPGKGLEWV | NIGSSSVSWYQQLPGTAPKLLIYKNNQ |
| | | GRIKSVTDGETTDYAAPVKGRFTI | RPSGVPDRFSGSKSGTSASLAISGLRS |
| | | SRDDSKSTLYLQMNSLKTEDTAVY | EDEADYYCSTWDDSLSIRVFGGGTKLT |
| | | YCTSSFCCRGGSCPSHDTSYCGGQ | VL (SEQ ID NO: 1659) |
| | | YKSYYYMDVWGKGTTVTVSS | |
| | | (SEQ ID NO: 1465) | |
| 134 | AIP- | EVQLVESGGALVKPGGSLRLSCAA | QSVLTQPPSASGTPGQRVTISCSGSSS |
| | 150485 | SGFTFSKAWMSWVRQAPGKGLEWV | NIGSSSVSWYQQLPGTAPKLLIYKNNQ |
| | | GRIKSVTDGETTDYAAPVKGRFTI | RPSGVPDRFSGSKSGTSASLAISGLRS |
| | | SRDDSKSTLYLQMNSLKTEDTAVY | EDEADYYCSTWDDSLSVKVFGGGTKLT |
| | | YCTSSFCCRGGSCPSHDTSYCGGQ | VL (SEQ ID NO: 1660) |
| | | YKSYYYMDVWGKGTTVTVSS | |
| | | (SEQ ID NO: 1466) | |
| 135 | AIP- | EVQLVESGGALVKPGGSLRLSCAA | QSVLTQPPSASGTPGQRVTISCSGSSS |
| | 135679 | SGFTFSKAWMSWVRQAPGKGLEWV | NIGSSSVSWYQQLPGTAPKLLIYKNNQ |
| | | GRIKSVTDGETTDYAAPVKGRFTI | RPSGVPDRFSGSKSGTSASLAISGLRS |
| | | SRDDSKSTLYLQMNSLKTEDTAVY | EDEADYYCSTWDDSLSVWVFGGGTKLT |
| | | YCTSSFCCRGGSCPSHDTSYCGGQ | VL (SEQ ID NO: 1661) |
| | | YKSYYYMDVWGKGTTVTVSS | |
| | | (SEQ ID NO: 1467) | |
| 136 | AIP- | EVQLVESGGALVKPGGSLRLSCAA | QSVLTQPPSASGTPGQRVTISCSGSSS |
| | 166847 | SGFTFSKAWMSWVRQAPGKGLEWV | NIGSSSVSWYQQLPGTAPKLLIYKNNQ |
| | | GRIKSVTDGETTDYAAPVKGRFTI | RPSGVPDRFSGSKSGTSASLAISGLRS |
| | | SRDDSKSTLYLQMNSLKTEDTAVY | EDEADYYCSTWDDSLSVHVFGGGTKLT |
| | | YCTSSFCCRGGSCPSHDTSYCGGQ | VL (SEQ ID NO: 1662) |
| | | YKSYYYMDVWGKGTTVTVSS | |
| | | (SEQ ID NO: 1468) | |
| 137 | AIP- | EVQLVESGGALVKPGGSLRLSCAA | QSVLTQPPSASGTPGQRVTISCSGSSS |
| | 124013 | SGFTFSKAWMSWVRQAPGKGLEWV | NIGSSSVSWYQQLPGTAPKLLIYKNNQ |
| | | GRIKSVTDGETTDYAAPVKGRFTI | RPSGVPDRFSGSKSGTSASLAISGLRS |
| | | SRDDSKSTLYLQMNSLKTEDTAVY | EDEADYYCSTWDDSLSVQVFGGGTKLT |
| | | YCTSSFCCRGGSCPSHDTSYCGGQ | VL (SEQ ID NO: 1663) |
| | | YKSYYYMDVWGKGTTVTVSS | |
| | | (SEQ ID NO: 1469) | |
| 138 | AIP- | EVQLVESGGALVKPGGSLRLSCAA | QSVLTQPPSASGTPGQRVTISCSGSSS |
| | 126285 | SGFTFSKAWMSWVRQAPGKGLEWV | NIGSSSVSWYQQLPGTAPKLLIYKNNQ |
| | | GRIKSVTDGETTDYAAPVKGRFTI | RPSGVPDRFSGSKSGTSASLAISGLRS |
| | | SRDDSKSTLYLQMNSLKTEDTAVY | EDEADYYCSTWDDSLSVRIFGGGTKLT |
| | | YCTSSFCCRGGSCPSHDTSYCGGQ | VL (SEQ ID NO: 1664) |
| | | YKSYYYMDVWGKGTTVTVSS | |
| | | (SEQ ID NO: 1470) | |
| 139 | AIP- | EVQLVESGGALVKPGGSLRLSCAA | QSVLTQPPSASGTPGQRVTISCSGSSS |
| | 190274 | SGFTFSKAWMSWVRQAPGKGLEWV | DIGSSSVSWYQQLPGTAPKLLIYKNNQ |
| | | GRIKSVTDGETTDYAAPVKGRFTI | RPSGVPDRFSGSKSGTSASLAISGLRS |
| | | SRDDSKSTLYLQMNSLKTEDTAVY | EDEADYYCSTWNDQLSVRVFGGGTKLT |
| | | YCTSSFCCRGGSCPSHDTSYCGGQ | VL (SEQ ID NO: 1665) |
| | | YKSYYYMDVWGKGTTVTVSS | |
| | | (SEQ ID NO: 1471) | |
| 140 | AIP- | EVQLVESGGALVKPGGSLRLSCAA | QSVLTQPPSASGTPGQRVTISCHGSES |
| | 150277 | SGFTFSKAWMSWVRQAPGKGLEWV | DIGSHDVLWYQQLPGTAPKLLIYKNNQ |
| | | GRIKSVTDGETTDYAAPVKGRFTI | RPSGVPDRFSGSKSGTSASLAISGLRS |
| | | SRDDSKSTLYLQMNSLKTEDTAVY | EDEADYYCSTWDDSLSVRVFGGGTKLT |
| | | YCTSSFCCRGGSCPSHDTSYCGGQ | VL (SEQ ID NO: 1666) |
| | | YKSYYYMDVWGKGTTVTVSS | |
| | | (SEQ ID NO: 1472) | |
| 141 | AIP- | EVQLVESGGALVKPGGSLRLSCAA | QSVLTQPPSASGTPGQRVTISCSGSSS |
| | 104364 | SGFTFSKAWYSWVRQAPGKGLEWV | NIGSSSVSWYQQLPGTAPKLLIYKNNQ |
| | | GRIKSVTDGETTDYAAPVKGRFTI | RPSGVPDRFSGSKSGTSASLAISGLRS |
| | | SRDDSKSTLYLQMNSLKTEDTAVY | EDEADYYCSTWDDSLSVRVFGGGTKLT |
| | | YCTSSFCCRGGSCPSHDTSYCGGQ | VL (SEQ ID NO: 1667) |
| | | YKSYYYMDVWGKGTTVTVSS | |
| | | (SEQ ID NO: 1473) | |
| 142 | AIP- | EVQLVESGGGLVQPGGSLRLSCAA | QSVLTQPPSASGTPGQRVTISCSGSSS |
| | 180422 | SGFTFSKAWMSWVRQAPGKGLEWV | NIGSSSVSWYQQLPGTAPKLLIYKNNQ |
| | | GRIKSVTDGETTEYAASVKGRFTI | RPSGVPDRFSGSKSGTSASLAISGLRS |
| | | SRDDSKNSLYLQMNSLKTEDTAVY | EDEADYYCSTWDDSLSVRVFGGGTKLT |
| | | YCTSSFCCRGGSCPSHDTSYCGGQ | VL (SEQ ID NO: 1668) |
| | | YKSYYYMDVWGKGTTVTVSS | |
| | | (SEQ ID NO: 1474) | |
| 143 | AIP- | EVQLVESGGGLVQPGGSLRLSCAA | QSVLTQPPSVSGAPGQRVTISCSGSSS |
| | 166722 | SGFTFSKAWMSWVRQAPGKGLEWV | NIGSSSVSWYQQLPGTAPKLLIYKNNQ |
| | | GRIKSVTDGETTEYAASVKGRFTI | RPSGVPDRFSGSKSGTSASLAITGLQA |
| | | SRDDSKNSLYLQMNSLKTEDTAVY | EDEADYYCSTWDDSLSVRVFGGGTKLT |
| | | YCTSSFCCRGGSCPSHDTSYCGGQ | VL (SEQ ID NO: 1669) |
| | | YKSYYYMDVWGKGTTVTVSS | |
| | | (SEQ ID NO: 1475) | |
| 144 | AIP- | EVQLVESGGGLVQPGPSLRLSCTA | QSVLTQPPSVSGAPGQRVTISCSGSSS |
| | 193490 | SGFTFSKAWMSWVRQAPGKGLEWV | NIGSSSVSWYQQLPGTAPKLLIYKNNQ |
| | | GFIKSVTDGETTEYAASVKGRFTI | RPSGVPDRFSGSKSGTSASLAITGLQA |
| | | SRDDSKSIAYLQMNSLKTEDTAVY | EDEADYYCSTWDDSLSVRVFGGGTKLT |
| | | YCTSSFCCRGGSCPSHDTSYCGGQ | VL (SEQ ID NO: 1670) |
| | | YKSYYYMDVWGKGTTVTVSS | |
| | | (SEQ ID NO: 1476) | |
| 145 | AIP- | EVQLVESGGALVKPGGSLRLSCAA | QSVLTQPPSASGTPGQRVTISCSGSSS |
| | 129967 | SGFTFSKAWMSWVRQAPGKGLEWV | NIGSSSVSWYQQLPGTAPKLLIYKNNQ |
| | | GRIKSVTDGETTDYAAPVKGRFTI | RPSGVPDRFSGSKSGTSASLAISGLRS |
| | | SRDDSKSTLYLQMNSLKTEDTAVY | EDEADYYCSTWDDSLSVRVFGGGTKLT |
| | | YCTSSYCCRSGSCPSSDTSYCNGQ | VL (SEQ ID NO: 1671) |
| | | FKSYYYMDPWGKGTTVTVSS | |
| | | (SEQ ID NO: 1477) | |
| 146 | AIP- | EVQLVESGGALVKPGGSLRLSCAA | QSVLTQPPSASGTPGQRVTISCSGSSS |
| | 126175 | SGFTFSKAWMSWVRQAPGKGLEWV | NIGSSSVSWYQQLPGTAPKLLIYKNNQ |
| | | GRIKSVTDGETTDYAAPVKGRFTI | RPSGVPDRFSGSKSGTSASLAISGLRS |
| | | SRDDSKSTLYLQMNSLKTEDTAVY | EDEADYYCSTWDDSLSVRVFGGGTKLT |
| | | YCTSSFCCRSGSCPSSDTSYCNGQ | VL (SEQ ID NO: 1672) |
| | | YKSYYYVNIWGKGTTVTVSS | |
| | | (SEQ ID NO: 1478) | |
| 147 | AIP- | EVQLVESGGALVKPGGSLRLSCAA | QSVLTQPPSASGTPGQRVTISCSGSSS |
| | 180905 | SGFTFSKAWMSWVRQAPGKGLEWV | NIGSSSVSWYQQLPGTAPKLLIYKNNQ |
| | | GRIKSVTDGETTDYAAPVKGRFTI | RPSGVPDRFSGSKSGTSASLAISGLRS |
| | | SRDDSKSTLYLQMNSLKTEDTAVY | EDEADYYCSTWDDSLSVRVFGGGTKLT |
| | | YCTTSFCCRGASCPSHDTSYCAGS | VL (SEQ ID NO: 1673) |
| | | YKSYYYVNIWGKGTTVTVSS | |
| | | (SEQ ID NO: 1479) | |
| 148 | AIP- | EVQLVESGGALVKPGGSLRLSCAA | QSVLTQPPSASGTPGQRVTISCSGSSS |
| | 141706 | SGFTFSKAWMSWVRQAPGKGLEWV | NIGSSSVSWYQQLPGTAPKLLIYKNNQ |
| | | GRIKSVTDGETTDYAAPVKGRFTI | RPSGVPDRFSGSKSGTSASLAISGLRS |
| | | SRDDSKSTLYLQMNSLKTEDTAVY | EDEADYYCSTWDDSLSVRVFGGGTKLT |
| | | YCTSAFCCRGKSCPSSDTSYCGGQ | VL (SEQ ID NO: 1674) |
| | | YPSYYYVNIWGKGTTVTVSS | |
| | | (SEQ ID NO: 1480) | |
| 149 | AIP- | EVQLVESGGALVKPGGSLRLSCAA | QSVLTQPPSASGTPGQRVTISCSGSSS |
| | 105092 | SGFTFSKAWMSWVRQAPGKGLEWV | NIGSSSVSWYQQLPGTAPKLLIYKNNQ |
| | | GRIKSVTDGETTDYAAPVKGRFTI | RPSGVPDRFSGSKSGTSASLAISGLRS |
| | | SRDDSKSTLYLQMNSLKTEDTAVY | EDEADYYCSTWDDSLSVRVFGGGTKLT |
| | | YCTSAFCCRGKSCPSHDTSFCGGQ | VL (SEQ ID NO: 1675) |
| | | DKRYYYVNIWGKGTTVTVSS | |
| | | (SEQ ID NO: 1481) | |
| 150 | AIP- | EVQLVESGGALVKPGGSLRLSCAA | QSVLTQPPSASGTPGQRVTISCSGSSS |
| | 152031 | SGFTFSKAWMSWVRQAPGKGLEWV | NIGSSSVSWYQQLPGTAPKLLIYKNNQ |
| | | GRIKSVTDGETTDYAAPVKGRFTI | RPSGVPDRFSGSKSGTSASLAISGLRS |
| | | SRDDSKSTLYLQMNSLKTEDTAVY | EDEADYYCSTWDDSLSVRVFGGGTKLT |
| | | YCTSAFCCRGGNCPSHETSYCNGQ | VL (SEQ ID NO: 1676) |
| | | NKQYYYMDVWGKGTTVTVSS | |
| | | (SEQ ID NO: 1482) | |
| 151 | AIP- | EVQLVESGGALVKPGGSLRLSCAA | QSVLTQPPSASGTPGQRVTISCSGSSS |
| | 163319 | SGFTFSKAWMSWVRQAPGKGLEWV | NIGSSSVSWYQQLPGTAPKLLIYKNNQ |
| | | GRIKSVTDGETTDYAAPVKGRFTI | RPSGVPDRFSGSKSGTSASLAISGLRS |
| | | SRDDSKSTLYLQMNSLKTEDTAVY | EDEADYYCSTWDDSLSVRVFGGGTKLT |
| | | YCTSSFCCRGNQCPSSDTSFCGGQ | VL (SEQ ID NO: 1677) |
| | | DKRYYYMDPWGKGTTVTVSS | |
| | | (SEQ ID NO: 1483) | |
| 152 | AIP- | EVQLVESGGALVKPGGSLRLSCAA | QSVLTQPPSASGTPGQRVTISCSGSSS |
| | 160621 | SGFTFSKAWMSWVRQAPGKGLEWV | NIGSSSVSWYQQLPGTAPKLLIYKNNQ |
| | | GRIKSVTDGETTDYAAPVKGRFTI | RPSGVPDRFSGSKSGTSASLAISGLRS |
| | | SRDDSKSTLYLQMNSLKTEDTAVY | EDEADYYCSTWDDSLSVRVFGGGTKLT |
| | | YCTTSFCCRGNQCPSHETSYCGGY | VL (SEQ ID NO: 1678) |
| | | YKSYFYMDVWGKGTTVTVSS | |
| | | (SEQ ID NO: 1484) | |
| 153 | AIP- | EVQLVESGGALVKPGGSLRLSCAA | QSVLTQPPSASGTPGQRVTISCSGSSS |
| | 145212 | SGFTFSKAWMSWVRQAPGKGLEWV | NIGSSSVSWYQQLPGTAPKLLIYKNNQ |
| | | GRIKSVTDGETTDYAAPVKGRFTI | RPSGVPDRFSGSKSGTSASLAISGLRS |
| | | SRDDSKSTLYLQMNSLKTEDTAVY | EDEADYYCSTWDDSLSVRVFGGGTKLT |
| | | YCTSSYCCRGKQCPSHDTSYCAGQ | VL (SEQ ID NO: 1679) |
| | | YADYYYMDVWGKGTTVTVSS | |
| | | (SEQ ID NO: 1485) | |
| 154 | AIP- | EVQLVESGGALVKPGGSLRLSCAA | QSVLTQPPSASGTPGQRVTISCSGSSS |
| | 112328 | SGFTFSKAWMSWVRQAPGKGLEWV | NIGSSSVSWYQQLPGTAPKLLIYKNNQ |
| | | GRIKSVTDGETTDYAAPVKGRFTI | RPSGVPDRFSGSKSGTSASLAISGLRS |
| | | SRDDSKSTLYLQMNSLKTEDTAVY | EDEADYYCSTWDDSLSVRVFGGGTKLT |
| | | YCISSFCCRGKQCPSSDTSYCNGQ | VL (SEQ ID NO: 1680) |
| | | YADYYYMDVWGKGTTVTVSS | |
| | | (SEQ ID NO: 1486) | |
| 155 | AIP- | EVQLVESGGALVKPGGSLRLSCAA | QSVLTQPPSASGTPGQRVTISCSGSSS |
| | 193106 | SGFTFSKAWMSWVRQAPGKGLEWV | NIGSSSVSWYQQLPGTAPKLLIYKNNQ |
| | | GRIKSVTDGETTDYAAPVKGRFTI | RPSGVPDRFSGSKSGTSASLAISGLRS |
| | | SRDDSKSTLYLQMNSLKTEDTAVY | EDEADYYCSTWDDSLSVRVFGGGTKLT |
| | | YCTSSFCCRGKQCPSSDTSYCNGQ | VL (SEQ ID NO: 1681) |
| | | YADYYYVNIWGKGTTVTVSS | |
| | | (SEQ ID NO: 1487) | |
| 156 | AIP- | EVQLVESGGALVKPGGSLRLSCAA | QSVLTQPPSASGTPGQRVTISCSGSSS |
| | 125062 | SGFTFSKAWMSWVRQAPGKGLEWV | NIGSSSVSWYQQLPGTAPKLLIYKNNQ |
| | | GRIKSVTDGETTDYAAPVKGRFTI | RPSGVPDRFSGSKSGTSASLAISGLRS |
| | | SRDDSKSTLYLQMNSLKTEDTAVY | EDEADYYCSTWDDSLSVRVFGGGTKLT |
| | | YCISSFCCRGKQCPSSDTSFCGGQ | VL (SEQ ID NO: 1682) |
| | | DKRYYFMDVWGKGTTVTVSS | |
| | | (SEQ ID NO: 1488) | |
| 157 | AIP- | EVQLVESGGALVKPGGSLRLSCAA | QSVLTQPPSASGTPGQRVTISCSGSSS |
| | 124301 | SGFTFSKAWMSWVRQAPGKGLEWV | NIGSSSVSWYQQLPGTAPKLLIYKNNQ |
| | | GRIKSVTDGETTDYAAPVKGRFTI | RPSGVPDRFSGSKSGTSASLAISGLRS |
| | | SRDDSKSTLYLQMNSLKTEDTAVY | EDEADYYCSTWDDSLSVRVFGGGTKLT |
| | | YCTSAFCCRGKQCPSSDTSYCGGQ | VL (SEQ ID NO: 1683) |
| | | YASFYYMDVWGKGTTVTVSS | |
| | | (SEQ ID NO: 1489) | |
| 158 | AIP- | EVQLVESGGALVKPGGSLRLSCAA | QSVLTQPPSASGTPGQRVTISCSGSSS |
| | 124068 | SGFTFSKAWMSWVRQAPGKGLEWV | NIGSSSVSWYQQLPGTAPKLLIYKNNQ |
| | | GRIKSVTDGETTDYAAPVKGRFTI | RPSGVPDRFSGSKSGTSASLAISGLRS |
| | | SRDDSKSTLYLQMNSLKTEDTAVY | EDEADYYCSTWDDSLSVRVFGGGTKLT |
| | | YCTSSFCCQGNNCPSSDTSYCGGY | VL (SEQ ID NO: 1684) |
| | | YKDYYYMDVWGKGTTVTVSS | |
| | | (SEQ ID NO: 1490) | |
| 159 | AIP- | EVQLVESGGALVKPGGSLRLSCAA | QSVLTQPPSASGTPGQRVTISCSGSSS |
| | 144568 | SGFTFSKAWMSWVRQAPGKGLEWV | NIGSSSVSWYQQLPGTAPKLLIYKNNQ |
| | | GRIKSVTDGETTDYAAPVKGRFTI | RPSGVPDRFSGSKSGTSASLAISGLRS |
| | | SRDDSKSTLYLQMNSLKTEDTAVY | EDEADYYCSTWDDSLSVRVFGGGTKLT |
| | | YCTSSFCCQGNNCPSHDTSYCGGQ | VL (SEQ ID NO: 1685) |
| | | YKSYYYVNIWGKGTTVTVSS | |
| | | (SEQ ID NO: 1491) | |
| 160 | AIP- | EVQLVESGGALVKPGGSLRLSCAA | QSVLTQPPSASGTPGQRVTISCSGSSS |
| | 139782 | SGFTFSKAWMSWVRQAPGKGLEWV | NIGSSSVSWYQQLPGTAPKLLIYKNNQ |
| | | GRIKSVTDGETTDYAAPVKGRFTI | RPSGVPDRFSGSKSGTSASLAISGLRS |
| | | SRDDSKSTLYLQMNSLKTEDTAVY | EDEADYYCSTWDDSLSVRVFGGGTKLT |
| | | YCTSSFCCQGKNCPSHETSYCGGQ | VL (SEQ ID NO: 1686) |
| | | YADYYYMDVWGKGTTVTVSS | |
| | | (SEQ ID NO: 1492) | |
| 161 | AIP- | EVQLVESGGALVKPGGSLRLSCAA | QSVLTQPPSASGTPGQRVTISCSGSSS |
| | 171543 | SGFTFSKAWMSWVRQAPGKGLEWV | NIGSSSVSWYQQLPGTAPKLLIYKNNQ |
| | | GRIKSVTDGETTDYAAPVKGRFTI | RPSGVPDRFSGSKSGTSASLAISGLRS |
| | | SRDDSKSTLYLQMNSLKTEDTAVY | EDEADYYCSTWDDSLSVRVFGGGTKLT |
| | | YCTTSFCCHGNSCPSSDTSYCGGQ | VL (SEQ ID NO: 1687) |
| | | NKQYYYMDVWGKGTTVTVSS | |
| | | (SEQ ID NO: 1493) | |
| 162 | AIP- | EVQLVESGGALVKPGGSLRLSCAA | QSVLTQPPSASGTPGQRVTISCSGSSS |
| | 140148 | SGFTFSKAWMSWVRQAPGKGLEWV | NIGSSSVSWYQQLPGTAPKLLIYKNNQ |
| | | GRIKSVTDGETTDYAAPVKGRFTI | RPSGVPDRFSGSKSGTSASLAISGLRS |
| | | SRDDSKSTLYLQMNSLKTEDTAVY | EDEADYYCSTWDDSLSVRVFGGGTKLT |
| | | YCISSFCCHGNSCPSHDTSYCNGQ | VL (SEQ ID NO: 1688) |
| | | NKQYYYMDVWGKGTTVTVSS | |
| | | (SEQ ID NO: 1494) | |
| 163 | AIP- | EVQLVESGGALVKPGGSLRLSCAA | QSVLTQPPSASGTPGQRVTISCSGSSS |
| | 177193 | SGFTFSKAWMSWVRQAPGKGLEWV | NIGSSSVSWYQQLPGTAPKLLIYKNNQ |
| | | GRIKSVTDGETTDYAAPVKGRFTI | RPSGVPDRFSGSKSGTSASLAISGLRS |
| | | SRDDSKSTLYLQMNSLKTEDTAVY | EDEADYYCSTWDDSLSVRVFGGGTKLT |
| | | YCISSFCCHSNNCPSSDTSYCNGQ | VL (SEQ ID NO: 1689) |
| | | YKQYYYMDVWGKGTTVTVSS | |
| | | (SEQ ID NO: 1495) | |
| 164 | AIP- | EVQLVESGGALVKPGGSLRLSCAA | QSVLTQPPSASGTPGQRVTISCSGSSS |
| | 171348 | SGFTFSKAWMSWVRQAPGKGLEWV | NIGSSSVSWYQQLPGTAPKLLIYKNNQ |
| | | GRIKSVTDGETTDYAAPVKGRFTI | RPSGVPDRFSGSKSGTSASLAISGLRS |
| | | SRDDSKSTLYLQMNSLKTEDTAVY | EDEADYYCSTWDDSLSVRVFGGGTKLT |
| | | YCTSSFCCHSNNCPSHDTSYCGGQ | VL (SEQ ID NO: 1690) |
| | | YKSYYYVNIWGKGTTVTVSS | |
| | | (SEQ ID NO: 1496) | |
| 165 | AIP- | EVQLVESGGALVKPGGSLRLSCAA | QSVLTQPPSASGTPGQRVTISCSGSSS |
| | 193088 | SGFTFSKAWMSWVRQAPGKGLEWV | NIGSSSVSWYQQLPGTAPKLLIYKNNQ |
| | | GRIKSVTDGETTDYAAPVKGRFTI | RPSGVPDRFSGSKSGTSASLAISGLRS |
| | | SRDDSKSTLYLQMNSLKTEDTAVY | EDEADYYCSTWDDSLSVRVFGGGTKLT |
| | | YCISSFACHSNNCPSSDTSYVNGY | VL (SEQ ID NO: 1691) |
| | | YKQYYFMDVWGKGTTVTVSS | |
| | | (SEQ ID NO: 1497) | |
| 166 | AIP- | EVQLVESGGALVKPGGSLRLSCAA | QSVLTQPPSASGTPGQRVTISCSGSSS |
| | 182087 | SGFTFSKAWMSWVRQAPGKGLEWV | NIGSSSVSWYQQLPGTAPKLLIYKNNQ |
| | | GRIKSVTDGETTDYAAPVKGRFTI | RPSGVPDRFSGSKSGTSASLAISGLRS |
| | | SRDDSKSTLYLQMNSLKTEDTAVY | EDEADYYCSTWDDSLSVRVFGGGTKLT |
| | | YCTSSFCCHSNNCPSSDTSYCNGQ | VL (SEQ ID NO: 1692) |
| | | YKQYYYVNIWGKGTTVTVSS | |
| | | (SEQ ID NO: 1498) | |
| 167 | AIP- | EVQLVESGGALVKPGGSLRLSCAA | QSVLTQPPSASGTPGQRVTISCSGSSS |
| | 151388 | SGFTFSKAWMSWVRQAPGKGLEWV | NIGSSSVSWYQQLPGTAPKLLIYKNNQ |
| | | GRIKSVTDGETTDYAAPVKGRFTI | RPSGVPDRFSGSKSGTSASLAISGLRS |
| | | SRDDSKSTLYLQMNSLKTEDTAVY | EDEADYYCSTWDDSLSVRVFGGGTKLT |
| | | YCTSSFCCLGKACLSHDTSYCGGQ | VL (SEQ ID NO: 1693) |
| | | YASYYYVNIWGKGTTVTVSS | |
| | | (SEQ ID NO: 1499) | |
| 168 | AIP- | EVQLVESGGALVKPGGSLRLSCAA | QSVLTQPPSASGTPGQRVTISCSGSSS |
| | 149787 | SGFTFSKAWMSWVRQAPGKGLEWV | NIGSSSVSWYQQLPGTAPKLLIYKNNQ |
| | | GRIKSVTDGETTDYAAPVKGRFTI | RPSGVPDRFSGSKSGTSASLAISGLRS |
| | | SRDDSKSTLYLQMNSLKTEDTAVY | EDEADYYCSTWDDSLSVRVFGGGTKLT |
| | | YCTSSFCCLGKACLSSDTSYCGGY | VL (SEQ ID NO: 1694) |
| | | YASYYFVNIWGKGTTVTVSS | |
| | | (SEQ ID NO: 1500) | |
| 169 | AIP- | EVQLVESGGALVKPGGSLRLSCAA | QSVLTQPPSASGTPGQRVTISCSGSSS |
| | 126097 | SGFTFSKAWMSWVRQAPGKGLEWV | NIGSSSVSWYQQLPGTAPKLLIYKNNQ |
| | | GRIKSVTDGETTDYAAPVKGRFTI | RPSGVPDRFSGSKSGTSASLAISGLRS |
| | | SRDDSKSTLYLQMNSLKTEDTAVY | EDEADYYCSTWDDSLSVRVFGGGTKLT |
| | | YCTSSFACLGKACLSSDTSYVGGY | VL (SEQ ID NO: 1695) |
| | | YASYYFVNIWGKGTTVTVSS | |
| | | (SEQ ID NO: 1501) | |
| 170 | AIP- | EVQLVESGGALVKPGGSLRLSCAA | QSVLTQPPSASGTPGQRVTISCSGSSS |
| | 107759 | SGFTFSKAWMSWVRQAPGKGLEWV | NIGSSSVSWYQQLPGTAPKLLIYKNNQ |
| | | GRIKSVTDGETTDYAAPVKGRFTI | RPSGVPDRFSGSKSGTSASLAISGLRS |
| | | SRDDSKSTLYLQMNSLKTEDTAVY | EDEADYYCSTWDDSLSVRVFGGGTKLT |
| | | YCTSSYCCLGNSCPSSDTSYCGGQ | VL (SEQ ID NO: 1696) |
| | | FKSYYYMDPWGKGTTVTVSS | |
| | | (SEQ ID NO: 1502) | |
| 171 | AIP- | EVQLVESGGALVKPGGSLRLSCAA | QSVLTQPPSASGTPGQRVTISCSGSSS |
| | 148484 | SGFTFSKAWMSWVRQAPGKGLEWV | NIGSSSVSWYQQLPGTAPKLLIYKNNQ |
| | | GRIKSVTDGETTDYAAPVKGRFTI | RPSGVPDRFSGSKSGTSASLAISGLRS |
| | | SRDDSKSTLYLQMNSLKTEDTAVY | EDEADYYCSTWDDSLSVRVFGGGTKLT |
| | | YCTSSYCCLGNSCPSSDTSFCGGQ | VL (SEQ ID NO: 1697) |
| | | DKRYYYMDPWGKGTTVTVSS | |
| | | (SEQ ID NO: 1503) | |
| 172 | AIP- | EVQLVESGGALVKPGGSLRLSCAA | QSVLTQPPSASGTPGQRVTISCSGSSS |
| | 186403 | SGFTFSKAWMSWVRQAPGKGLEWV | NIGSSSVSWYQQLPGTAPKLLIYKNNQ |
| | | GRIKSVTDGETTDYAAPVKGRFTI | RPSGVPDRFSGSKSGTSASLAISGLRS |
| | | SRDDSKSTLYLQMNSLKTEDTAVY | EDEADYYCSTWDDSLSVRVFGGGTKLT |
| | | YCISSFCCLGGNCPSSETSYCGNQ | VL (SEQ ID NO: 1698) |
| | | YPSYYYMDVWGKGTTVTVSS | |
| | | (SEQ ID NO: 1504) | |
| 173 | AIP- | EVQLVESGGALVKPGGSLRLSCAA | QSVLTQPPSASGTPGQRVTISCSGSSS |
| | 166629 | SGFTFSKAWMSWVRQAPGKGLEWV | NIGSSSVSWYQQLPGTAPKLLIYKNNQ |
| | | GRIKSVTDGETTDYAAPVKGRFTI | RPSGVPDRFSGSKSGTSASLAISGLRS |
| | | SRDDSKSTLYLQMNSLKTEDTAVY | EDEADYYCSTWDDSLSVRVFGGGTKLT |
| | | YCISSFCCLGGNCPSSETSYCGNY | VL (SEQ ID NO: 1699) |
| | | YPSYFYMDVWGKGTTVTVSS | |
| | | (SEQ ID NO: 1505) | |
| 174 | AIP- | EVQLVESGGALVKPGGSLRLSCAA | QSVLTQPPSASGTPGQRVTISCSGSSS |
| | 165276 | SGFTFSKAWMSWVRQAPGKGLEWV | NIGSSSVSWYQQLPGTAPKLLIYKNNQ |
| | | GRIKSVTDGETTDYAAPVKGRFTI | RPSGVPDRFSGSKSGTSASLAISGLRS |
| | | SRDDSKSTLYLQMNSLKTEDTAVY | EDEADYYCSTWDDSLSVRVFGGGTKLT |
| | | YCTSSFCCLGGNCPSSETSYCGNQ | VL (SEQ ID NO: 1700) |
| | | YPSYYYVNIWGKGTTVTVSS | |
| | | (SEQ ID NO: 1506) | |
| 175 | AIP- | EVQLVESGGALVKPGGSLRLSCAA | QSVLTQPPSASGTPGQRVTISCSGSSS |
| | 188293 | SGFTFSKAWMSWVRQAPGKGLEWV | NIGSSSVSWYQQLPGTAPKLLIYKNNQ |
| | | GRIKSVTDGETTDYAAPVKGRFTI | RPSGVPDRFSGSKSGTSASLAISGLRS |
| | | SRDDSKSTLYLQMNSLKTEDTAVY | EDEADYYCSTWDDSLSVRVFGGGTKLT |
| | | YCTTSFACRGNQCPSHETSYVGGY | VL (SEQ ID NO: 1701) |
| | | YKSYFYMDVWGKGTTVTVSS | |
| | | (SEQ ID NO: 1507) | |
| 176 | AIP- | EVQLVESGGALVKPGGSLRLSCAA | QSVLTQPPSASGTPGQRVTISCSGSSS |
| | 109364 | SGFTFSKAWMSWVRQAPGKGLEWV | NIGSSSVSWYQQLPGTAPKLLIYKNNQ |
| | | GRIKSVTDGETTDYAAPVKGRFTI | RPSGVPDRFSGSKSGTSASLAISGLRS |
| | | SRDDSKSTLYLQMNSLKTEDTAVY | EDEADYYCSTWDDSLSVRVFGGGTKLT |
| | | YCTTSFACRGNQCPSSETSYVGGY | VL (SEQ ID NO: 1702) |
| | | YKSYFFMDVWGKGTTVIVSS | |
| | | (SEQ ID NO: 1508) | |
| 177 | AIP- | EVQLVESGGALVKPGGSLRLSCAA | QSVLTQPPSASGTPGQRVTISCSGSSS |
| | 191805 | SGFTFSKAWMSWVRQAPGKGLEWV | NIGSSSVSWYQQLPGTAPKLLIYKNNQ |
| | | GRIKSVTDGETTDYAAPVKGRFTI | RPSGVPDRFSGSKSGTSASLAISGLRS |
| | | SRDDSKSTLYLQMNSLKTEDTAVY | EDEADYYCSTWDDSLSVRVFGGGTKLT |
| | | YCISSFACRGKQCPSSDTSYVGGQ | VL (SEQ ID NO: 1703) |
| | | FKSYYFMDVWGKGTTVTVSS | |
| | | (SEQ ID NO: 1509) | |
| 178 | AIP- | EVQLVESGGALVKPGGSLRLSCAA | QSVLTQPPSASGTPGQRVTISCSGSST |
| | 181592 | SGFTFAKAWMSWVRQAPGKGLEWV | NIGSSSVYWYQQLPGTAPKLLIYKNNY |
| | | GRIKAADDGKQTDYAAPVKGRFTI | RPSGVPDRFSGSKSGTSASLAISGLRS |
| | | SRDDSKSTLYLQMNSLKTEDTAVY | EDEADYYCSTWDDSLSVRVFGGGTKLT |
| | | YCTSSFCCRGGSCLSHDTSYCGGQ | VL (SEQ ID NO: 1704) |
| | | YKSYYWMDVWGKGTTVIVSS | |
| | | (SEQ ID NO: 1510) | |
| 179 | AIP- | EVQLVESGGALVKPGGSLRLSCAA | QSVLTQPPSASGTPGQRVTISCSGSST |
| | 155587 | SGFTYAKAWMSWVRQAPGKGLEWV | NIGSSSVYWYQQLPGTAPKLLIYKNNY |
| | | GRIKSVQDGEQTDYAAPVKGRFTI | RASGVPDRFSGSKSGTSASLAISGLRS |
| | | SRDDSKSTLYLQMNSLKTEDTAVY | EDEADYYCSTWDDSLSVRVFGGGTKLT |
| | | YCTSSYCCLGGSCPSHDTSYCGGS | VL (SEQ ID NO: 1705) |
| | | YKSYYYMDVWGKGTTVTVSS | |
| | | (SEQ ID NO: 1511) | |
| 180 | AIP- | EVQLVESGGALVKPGGSLRLSCAA | QSVLTQPPSASGTPGQRVTISCTGSSS |
| | 147945 | SGFDASKAWFTWVRQAPGKGLEWV | NIGSSYVSWYQQLPGTAPKLLIYKNSL |
| | | GRIKSVTDGETTDYAAPVKGRFTI | RPQGVPDRFSGSKSGTSASLAISGLRS |
| | | SRDDSKSTLYLQMNSLKTEDTAVY | EDEADYYCSTWDDSLSVRVFGGGTKLT |
| | | YCTSSFCCRGGSCPSHDTSYCGGQ | VL (SEQ ID NO: 1706) |
| | | NKQYYYMDVWGKGTTVIVSS | |
| | | (SEQ ID NO: 1512) | |
| 181 | AIP- | EVQLVESGGALVKPGGSLRLSCAA | QSVLTQPPSASGTPGQRVTISCTGSSS |
| | 199264 | SGFDASKAWFTWVRQAPGKGLEWV | NIGSSYVSWYQQLPGTAPKLLIYKNSL |
| | | GRIKSVTDGETTDYAAPVKGRFTI | RPQGVPDRFSGSKSGTSASLAISGLRS |
| | | SRDDSKSTLYLQMNSLKTEDTAVY | EDEADYYCSTWDDSLSVRVFGGGTKLT |
| | | YCTSSFACRGGSCPSHDTSYVGGQ | VL (SEQ ID NO: 1707) |
| | | YKSYYYMDVWGKGTTVTVSS | |
| | | (SEQ ID NO: 1513) | |
| 182 | AIP- | EVQLVESGGALVKPGGSLRLSCAA | QSVLTQPPSASGTPGQRVTISCTGSSS |
| | 123438 | SGFDASKAWFTWVRQAPGKGLEWV | NIGSSYVSWYQQLPGTAPKLLIYKNSL |
| | | GRIKSVTDGETTDYAAPVKGRFTI | RPQGVPDRFSGSKSGTSASLAISGLRS |
| | | SRDDSKSTLYLQMNSLKTEDTAVY | EDEADYYCSTWDDSLSVRVFGGGTKLT |
| | | YCTSSYCCLGGSCPSHDTSYCGGS | VL (SEQ ID NO: 1708) |
| | | YKSYYYMDVWGKGTTVTVSS | |
| | | (SEQ ID NO: 1514) | |
| 183 | AIP- | EVQLVESGGALVKPGGSLRLSCAA | QSVLTQPPSASGTPGQRVTISCTGSSS |
| | 151315 | SGFDASKAWFTWVRQAPGKGLEWV | NIGSSYVSWYQQLPGTAPKLLIYKNSL |
| | | GRIKSVTDGETTDYAAPVKGRFTI | RPQGVPDRFSGSKSGTSASLAISGLRS |
| | | SRDDSKSTLYLQMNSLKTEDTAVY | EDEADYYCSTWDDSLSVRVFGGGTKLT |
| | | YCTSSFCCRGKSCPSHDTSYCGGQ | VL (SEQ ID NO: 1709) |
| | | YASYYYMDVWGKGTTVTVSS | |
| | | (SEQ ID NO: 1515) | |
| 184 | AIP- | EVQLVESGGALVKPGGSLRLSCAA | QSVLTQPPSASGTPGQRVTISCSGSPS |
| | 197785 | SGFTFSKAWMSWVRQAPGKGLEWV | NIGSASTSWYQQLPGTAPKLLIYKNNQ |
| | | GRIKAADDGKQTDYAAPVKGRFTI | RPSGVPDRFSGSKSGTSASLAISGLRS |
| | | SRDDSKSTLYLQMNSLKTEDTAVY | EDEADYYCSTWDDSLSVRVFGGGTKLT |
| | | YCTSSFCCRGGNCPSHETSYCGNQ | VL (SEQ ID NO: 1710) |
| | | YKSYYYMDVWGKGTTVTVSS | |
| | | (SEQ ID NO: 1516) | |
| 185 | AIP- | EVQLVESGGALVKPGGSLRLSCAA | QSVLTQPPSASGTPGQRVTISCSGSPS |
| | 115782 | SGFTFSKAWMSWVRQAPGKGLEWV | NIGSASTSWYQQLPGTAPKLLIYKNNQ |
| | | GRIKAADDGKQTDYAAPVKGRFTI | RPSGVPDRFSGSKSGTSASLAISGLRS |
| | | SRDDSKSTLYLQMNSLKTEDTAVY | EDEADYYCSTWDDSLSVRVFGGGTKLT |
| | | YCTSSFCCRSGSCPSSDTSYCNGQ | VL (SEQ ID NO: 1711) |
| | | YKSYYYMDVWGKGTTVTVSS | |
| | | (SEQ ID NO: 1517) | |
| 186 | AIP- | EVQLVESGGALVKPGGSLRLSCAA | QSVLTQPPSASGTPGQRVTISCSGSPS |
| | 138130 | SGFTFSKAWMSWVRQAPGKGLEWV | NIGSASTSWYQQLPGTAPKLLIYKNNQ |
| | | GRIKAADDGKQTDYAAPVKGRFTI | RPSGVPDRFSGSKSGTSASLAISGLRS |
| | | SRDDSKSTLYLQMNSLKTEDTAVY | EDEADYYCSTWDDSLSVRVFGGGTKLT |
| | | YCTSSFCCRGGSCPSHDTSYCGGQ | VL (SEQ ID NO: 1712) |
| | | YKSYYYVNIWGKGTTVTVSS | |
| | | (SEQ ID NO: 1518) | |
| 187 | AIP- | EVQLVESGGALVKPGGSLRLSCAA | QSVLTQPPSASGTPGQRVTISCSGSPS |
| | 170221 | SGFTFSKAWMSWVRQAPGKGLEWV | NIGSASTSWYQQLPGTAPKLLIYKNNQ |
| | | GRIKAADDGKQTDYAAPVKGRFTI | RPSGVPDRFSGSKSGTSASLAISGLRS |
| | | SRDDSKSTLYLQMNSLKTEDTAVY | EDEADYYCSTWDDSLSVRVFGGGTKLT |
| | | YCTTSFCCRGASCPSHDTSYCAGS | VL (SEQ ID NO: 1713) |
| | | YKSYYYMDVWGKGTTVTVSS | |
| | | (SEQ ID NO: 1519) | |
| 188 | AIP- | EVQLVESGGALVKPGGSLRLSCAA | QSVLTQPPSASGTPGQRVTISCSGSPS |
| | 167482 | SGFTFSKAWMSWVRQAPGKGLEWV | NIGSASTSWYQQLPGTAPKLLIYKNNQ |
| | | GRIKAADDGKQTDYAAPVKGRFTI | RPSGVPDRFSGSKSGTSASLAISGLRS |
| | | SRDDSKSTLYLQMNSLKTEDTAVY | EDEADYYCSTWDDSLSVRVFGGGTKLT |
| | | YCISSFCCRGNSCPSSDTSYCNGQ | VL (SEQ ID NO: 1714) |
| | | YKSYYYMDVWGKGTTVTVSS | |
| | | (SEQ ID NO: 1520) | |
| 189 | AIP- | EVQLVESGGALVKPGGSLRLSCAA | QSVLTQPPSASGTPGQRVTISCSGASS |
| | 189475 | SGFTFSKAWMSWVRQAPGKGLEWV | NIGHSSVYWYQQLPGTAPKLLIYRNNQ |
| | | GRIKAVTDGHTTDYAAPVKGRFTI | QPLGVPDRFSGSKSGTSASLAISGLRS |
| | | SRDDSKSTLYLQMNSLKTEDTAVY | EDEADYYCSTWDDALSIRVFGGGTKLT |
| | | YCTSSFCCRGGSCPSHDTSYCGGQ | VL (SEQ ID NO: 1715) |
| | | YKSYYYMDVWGKGTTVTVSS | |
| | | (SEQ ID NO: 1521) | |
| 190 | AIP- | EVQLVESGGALVKPGGSLRLSCAA | QSVLTQPPSASGTPGQRVTISCSGSSS |
| | 102833 | SGFVYSKAWMSWVRQAPGKGLEWV | NIGSSSVSWYQQLPGTAPKLLIYKNTQ |
| | | GRIKSVTDGQATDYAAPVKGRFTI | RASGVPDRFSGSKSGTSASLAISGLRS |
| | | SRDDSKSTLYLQMNSLKTEDTAVY | EDEADYYCSTWDDALNVRVFGGGTKLT |
| | | YCTSSFCCRGGSCPSHDTSYCGGQ | VL (SEQ ID NO: 1716) |
| | | YKSYYYMDVWGKGTTVTVSS | |
| | | (SEQ ID NO: 1522) | |
| 191 | AIP- | EVQLVESGGALVKPGGSLRLSCAA | QSVLTQPPSASGTPGQRVTISCSGSSS |
| | 173396 | SGFVFSKAWMSWVRQAPGKGLEWV | NIGSSSVSWYQQLPGTAPKLLIYRNNQ |
| | | GRIKSVTDGETTDYAAPVKGRFTI | QPLGVPDRFSGSKSGTSASLAISGLRS |
| | | SRDDSKSTLYLQMNSLKTEDTAVY | EDEADYYCSSWDDSSLVRVFGGGTKLT |
| | | YCTSSFCCRGKSCPSHDTSYCGGQ | VL (SEQ ID NO: 1717) |
| | | YASYYYMDVWGKGTTVTVSS | |
| | | (SEQ ID NO: 1523) | |
| 192 | AIP- | EVQLVESGGALVKPGGSLRLSCAA | QSVLTQPPSASGTPGQRVTISCSGSSS |
| | 132355 | SGFTFAKAWMSWVRQAPGKGLEWV | NIGSSSVTWYQQLPGTAPKLLIYKNNA |
| | | GRIKSVTDAETTDYAAPVKGRFTI | RPSGVPDRFSGSKSGTSASLAISGLRS |
| | | SRDDSKSTLYLQMNSLKTEDTAVY | EDEADYYCATWDNSLSIRVFGGGTKLT |
| | | YCTSSFCCRSGSCPSSDTSYCNGQ | VL (SEQ ID NO: 1718) |
| | | YKSYYWMDVWGKGTTVIVSS | |
| | | (SEQ ID NO: 1524) | |
| 193 | AIP- | EVQLVESGGALVKPGGSLRLSCAA | QSVLTQPPSASGTPGQRVTISCSGSKS |
| | 118505 | SGFTYAKAWFTWVRQAPGKGLEWV | NIGSSYVSWYQQLPGTAPKLLIYKDNQ |
| | | GRIKSTSDGGITDYAAPVKGRFTI | RASGVPDRFSGSKSGTSASLAISGLRS |
| | | SRDDSKSTLYLQMNSLKTEDTAVY | EDEADYYCSTWDDALSVRVFGGGTKLT |
| | | YCTSSFCCRGGSCPSHDTSFCGGQ | VL (SEQ ID NO: 1719) |
| | | YKSYYYMDVWGKGTTVTVSS | |
| | | (SEQ ID NO: 1525) | |
| 194 | AIP- | EVQLVESGGALVKPGGSLRLSCAA | QSVLTQPPSASGTPGQRVTISCSGSSS |
| | 131972 | SGFTFSKAWMSWVRQAPGKGLEWV | NIGSSSVYWYQQLPGTAPKLLIYKNNQ |
| | | GRIKSVSDGETTDYAAPVKGRFTI | RPSGVPDRFSGSKSGTSASLAISGLRS |
| | | SRDDSKSTLYLQMNSLKTEDTAVY | EDEADYYCSTWDDSLSVRVFGGGTKLT |
| | | YCTSSFCCRGGSCPSRDTSYCGGQ | VL (SEQ ID NO: 1720) |
| | | YKSYYFMDVWGKGTTVTVSS | |
| | | (SEQ ID NO: 1526) | |
| 195 | AIP- | EVQLVESGGGLVKPGGSLRLSCAA | QSVLTQPPSASGTPGQRVTISCSGSSS |
| | 189526 | SGFTFSKAWMTWVRQAPGKGLEWV | NIGSSSVSWYQQLPGTAPKLLIYKNNQ |
| | | GRIKSTSDGGITDYAAPVKGRFTI | RPSGVPDRFSGSKSGTSASLAISGLRS |
| | | SRDDSKNTLYLQMNSLKTEDTAVY | EDEADYYCSTWDDSLSVRVFGGGTKLT |
| | | YCTTSFCCRGGRCPSRDTSFCGGQ | VL (SEQ ID NO: 1726 |
| | | YNSYYYMDVWGQGTTVTVSS | |
| | | (SEQ ID NO: 1725) | |

TABLE 2B

| | AIP | | | | | | |
|---|---|---|---|---|---|---|---|
| | Number | HCDR1 | HCDR2 | HCDR3 | LCDR1 | LCDR2 | LCDR3 |
| 19 | AIP- | GFTFSKAW | RIKSVTEGE | TSSFCCRGGS | SGSSSNIG | KNNQRPS | STWDESL |
| | 148327 | MT (SEQ | TTDYAAPVK | CPSHDTSFCG | SSSVS | (SEQ ID | SVRV |
| | | ID | G (SEQ ID | CQDKRYYYMD | (SEQ ID | NO: 945) | (SEQ ID |
| | | NO: 169) | NO: 363) | V (SEQ ID | NO: 751) | | NO: 1139) |
| | | | | NO: 557) | | | |
| 19 | AIP- | GFTFSKAW | RIKSVTEGE | TSSFCCRGGS | SGSSSNIG | KNNQRPS | STWDESL |
| | 198092 | MT (SEQ | TTDYAAPVK | CPSHDTSFCG | SSSVS | (SEQ ID | SVRV |
| | | ID | G (SEQ ID | GQDKRYYYMD | (SEQ ID | NO: 946) | (SEQ ID |
| | | NO: 170) | NO: 364) | V (SEQ ID | NO: 752) | | NO: 1140) |
| | | | | NO: 558) | | | |
| 19 | AIP- | GFTFSKAW | RIKSVTDGE | TSSFCCRGGS | SGSSSNIG | KNNQRPS | STWDESL |
| | 184490 | MT (SEQ | TTDYAAPVK | CPSHDTSFCG | SSSVS | (SEQ ID | SVRV |
| | | ID | G (SEQ ID | GSYKSYYYMD | (SEQ ID | NO: 947) | (SEQ ID |
| | | NO: 171) | NO: 365) | V (SEQ ID | NO: 753) | | NO: 1141) |
| | | | | NO: 559) | | | |
| 19 | AIP- | GFTFSKAW | RIKSVTDGE | TSSFCCRGGS | SGSSSNIG | KNNQRPS | STWDESL |
| | 102396 | MS (SEQ | TTDYAAPVK | CPSHDTSYCG | SSSVS | (SEQ ID | SVRV |
| | | ID | G (SEQ ID | GQYKSYYYMD | (SEQ ID | NO: 948) | (SEQ ID |
| | | NO: 172) | NO: 366) | V (SEQ ID | NO: 754) | | NO: 1142) |
| | | | | NO: 560) | | | |
| 20 | AIP- | GYTFSKAW | RIKSVTDGE | TSSFCCRGGS | SGSSSNIG | KNNQRPS | STWDDSL |
| | 150055 | MS (SEQ | TTDYAAPVK | CPSHDTSYCG | SSSVS | (SEQ ID | SVRV |
| | | ID | G (SEQ ID | GQYKSYYYMD | (SEQ ID | NO: 949) | (SEQ ID |
| | | NO: 173) | G NO: 367) | V (SEQ ID | NO: 755) | | NO: 1143) |
| | | | | NO: 561) | | | |
| 20 | AIP- | GFDFSKAW | RIKSVTDGE | TSSFCCRGGS | SGSSSNIG | KNNQRPS | STWDDSL |
| | 167084 | MS (SEQ | TTDYAAPVK | CPSHDTSYCG | SSSVS | (SEQ ID | SVRV |
| | | ID | G (SEQ ID | GQYKSYYYMD | (SEQ ID | NO: 950) | (SEQ ID |
| | | NO: 174) | NO: 368) | V (SEQ ID | NO: 756) | | NO: 1144) |
| | | | | NO: 562) | | | |
| 20 | AIP- | GFVFSKAW | RIKSVTDGE | TSSFCCRGGS | SGSSSNIG | KNNQRPS | STWDDSL |
| | 185304 | MS (SEQ | TTDYAAPVK | CPSHDTSYCG | SSSVS | (SEQ ID | SVRV |
| | | ID | G (SEQ ID | GQYKSYYYMD | (SEQ ID | NO: 951) | (SEQ ID |
| | | NO: 175) | NO: 369) | V (SEQ ID | NO: 757) | | NO: 1145) |
| | | | | NO: 563) | | | |
| 20 | AIP- | GFTYSKAW | RIKSVTDGE | TSSFCCRGGS | SGSSSNIG | KNNQRPS | STWDDSL |
| | 134770 | MS (SEQ | TTDYAAPVK | CPSHDTSYCG | SSSVS | (SEQ ID | SVRV |
| | | ID | G (SEQ ID | GQYKSYYYMD | (SEQ ID | NO: 952) | (SEQ ID |
| | | NO: 176) | NO: 370) | V (SEQ ID | NO: 758) | | NO: 1146) |
| | | | | NO: 564) | | | |
| 20 | AIP- | GFTFAKAW | RIKSVTDGE | TSSFCCRGGS | SGSSSNIG | KNNQRPS | STWDDSL |
| | 141887 | MS (SEQ | TTDYAAPVK | CPSHDTSYCG | SSSVS | (SEQ ID | SVRV |
| | | ID | G (SEQ ID | GQYKSYYYMD | (SEQ ID | NO: 953) | (SEQ ID |
| | | NO: 177) | NO: 371) | V (SEQ ID | NO: 759) | | NO: 1147) |
| | | | | NO: 565) | | | |
| 20 | AIP- | GFTFSNAW | RIKSVTDGE | TSSFCCRGGS | SGSSSNIG | KNNQRPS | STWDDSL |
| | 196203 | MS (SEQ | TTDYAAPVK | CPSHDTSYCG | SSSVS | (SEQ ID | SVRV |
| | | ID | G (SEQ ID | GQYKSYYYMD | (SEQ ID | NO: 954) | (SEQ ID |
| | | NO: 178) | NO: 372) | V (SEQ ID | NO: 760) | | NO: 1148) |
| | | | | NO: 566) | | | |
| 20 | AIP- | GFTFSRAW | RIKSVTDGE | TSSFCCRGGS | SGSSSNIG | KNNQRPS | STWDDSL |
| | 184151 | MS (SEQ | TTDYAAPVK | CPSHDTSYCG | SSSVS | (SEQ ID | SVRV |
| | | ID | G (SEQ ID | GQYKSYYYMD | (SEQ ID | NO: 955) | (SEQ ID |
| | | NO: 179) | NO: 373) | V (SEQ ID | NO: 761) | | NO: 1149) |
| | | | | NO: 567) | | | |
| 20 | AIP- | GFTFSMAW | RIKSVTDGE | TSSFCCRGGS | SGSSSNIG | KNNQRPS | STWDDSL |
| | 128195 | MS (SEQ | TTDYAAPVK | CPSHDTSYCG | SSSVS | (SEQ ID | SVRV |
| | | ID | G (SEQ ID | GQYKSYYYMD | (SEQ ID | NO: 956) | (SEQ ID |
| | | NO: 180) | NO: 374) | V (SEQ ID | NO: 762) | | NO: 1150) |
| | | | | NO: 568) | | | |
| 20 | AIP- | GFTFSAAW | RIKSVTDGE | TSSFCCRGGS | SGSSSNIG | KNNQRPS | STWDDSL |
| | 116579 | MS (SEQ | TTDYAAPVK | CPSHDTSYCG | SSSVS | (SEQ ID | SVRV |
| | | ID | G (SEQ ID | GQYKSYYYMD | (SEQ ID | NO: 957) | (SEQ ID |
| | | NO: 181) | NO: 375) | V (SEQ ID | NO: 763) | | NO: 1151) |
| | | | | NO: 569) | | | |
| 20 | AIP- | GFTFSHAW | RIKSVTDGE | TSSFCCRGGS | SGSSSNIG | KNNQRPS | STWDDSL |
| | 192329 | MS (SEQ | TTDYAAPVK | CPSHDTSYCG | SSSVS | (SEQ ID | SVRV |
| | | ID | G (SEQ ID | GQYKSYYYMD | (SEQ ID | NO: 958) | (SEQ ID |
| | | NO: 182) | NO: 376) | V (SEQ ID | NO: 764) | | NO: 1152) |
| | | | | NO: 570) | | | |
| 21 | AIP- | GFTFSHAW | RIKSVTDGE | TSSFCCRGGS | SGSSSNIG | KNNQRPS | STWDDSL |
| | 192329 | MS (SEQ | TTDYAAPVK | CPSHDTSYCG | SSSVS | (SEQ ID | SVRV |
| | | ID | G (SEQ ID | GQYKSYYYMD | (SEQ ID | NO: 959) | (SEQ ID |
| | | NO: 183) | NO: 377) | V (SEQ ID | NO: 765) | | NO: 1153) |
| | | | | NO: 571) | | | |
| 21 | AIP- | GFTFSKAY | RIKSVTDGE | TSSFCCRGGS | SGSSSNIG | KNNQRPS | STWDDSL |
| | 197809 | MS (SEQ | TTDYAAPVK | CPSHDTSYCG | SSSVS | (SEQ ID | SVRV |
| | | ID | G (SEQ ID | GQYKSYYYMD | (SEQ ID | NO: 960) | (SEQ ID |
| | | NO: 184) | NO: 378) | V (SEQ ID | NO: 766) | | NO: 1154) |
| | | | | NO: 572) | | | |
| 21 | AIP- | GFTFSKAW | RIKSVTDGE | TSSFCCRGGS | SGSSSNIG | KNNQRPS | STWDDSL |
| | 142489 | FS (SEQ | TTDYAAPVK | CPSHDTSYCG | SSSVS | (SEQ ID | SVRV |
| | | ID | G (SEQ ID | GQYKSYYYMD | (SEQ ID | NO: 961) | (SEQ ID |
| | | NO: 185) | NO: 379) | V (SEQ ID | NO: 767) | | NO: 1155) |
| | | | | NO: 573) | | | |
| 21 | AIP- | GFTFSKAW | RIQSVTDGE | TSSFCCRGGS | SGSSSNIG | KNNQRPS | STWDDSL |
| | 148102 | MS (SEQ | TTDYAAPVK | CPSHDTSYCG | SSSVS | (SEQ ID | SVRV |
| | | ID | G (SEQ ID | GQYKSYYYMD | (SEQ ID | NO: 962) | (SEQ ID |
| | | NO: 186) | NO: 380) | V (SEQ ID | NO: 768) | | NO: 1156) |
| | | | | NO: 574) | | | |
| 21 | AIP- | GFTFSKAW | RIKAVTDGE | TSSFCCRGGS | SGSSSNIG | KNNQRPS | STWDDSL |
| | 167726 | MS (SEQ | TTDYAAPVK | CPSHDTSYCG | SSSVS | (SEQ ID | SVRV |
| | | ID | G (SEQ ID | GQYKSYYYMD | (SEQ ID | NO: 963) | (SEQ ID |
| | | NO: 187) | NO: 381) | V (SEQ ID | NO: 769) | | NO: 1157) |
| | | | | NO: 575) | | | |
| 21 | AIP- | GFTFSKAW | RIKSATDGE | TSSFCCRGGS | SGSSSNIG | KNNQRPS | STWDDSL |
| | 199834 | MS (SEQ | TTDYAAPVK | CPSHDTSYCG | SSSVS | (SEQ ID | SVRV |
| | | ID | G (SEQ ID | GQYKSYYYMD | (SEQ ID | NO: 964) | (SEQ ID |
| | | NO: 188) | NO: 382) | V (SEQ ID | NO: 770) | | NO: 1158) |
| | | | | NO: 576) | | | |
| 21 | AIP- | GFTFSKAW | RIKSNTDGE | TSSFCCRGGS | SGSSSNIG | KNNQRPS | STWDDSL |
| | 143179 | MS (SEQ | TTDYAAPVK | CPSHDTSYCG | SSSVS | (SEQ ID | SVRV |
| | | ID | G (SEQ ID | GQYKSYYYMD | (SEQ ID | NO: 965) | (SEQ ID |
| | | NO: 189) | NO: 383) | V (SEQ ID | NO: 771) | | NO: 1159) |
| | | | | NO: 577) | | | |
| 21 | AIP- | GFTFSKAW | RIKSVHDGE | TSSFCCRGGS | SGSSSNIG | KNNQRPS | STWDDSL |
| | 195587 | MS (SEQ | TTDYAAPVK | CPSHDTSYCG | SSSVS | (SEQ ID | SVRV |
| | | ID | G (SEQ ID | GQYKSYYYMD | (SEQ ID | NO: 966) | (SEQ ID |
| | | NO: 190) | NO: 384) | V (SEQ ID | NO: 772) | | NO: 1160) |
| | | | | NO: 578) | | | |
| 21 | AIP- | GFTFSKAW | RIKSVDDGE | TSSFCCRGGS | SGSSSNIG | KNNQRPS | STWDDSL |
| | 153462 | MS (SEQ | TTDYAAPVK | CPSHDTSYCG | SSSVS | (SEQ ID | SVRV |
| | | ID | G (SEQ ID | GQYKSYYYMD | (SEQ ID | NO: 967) | (SEQ ID |
| | | NO: 191) | NO: 385) | V (SEQ ID | NO: 773) | | NO: 1161) |
| | | | | NO: 579) | | | |
| 21 | AIP- | GFTFSKAW | RIKSVQDGE | TSSFCCRGGS | SGSSSNIG | KNNQRPS | STWDDSL |
| | 115363 | MS (SEQ | TTDYAAPVK | CPSHDTSYCG | SSSVS | (SEQ ID | SVRV |
| | | ID | G (SEQ ID | GQYKSYYYMD | (SEQ ID | NO: 968) | (SEQ ID |
| | | NO: 192) | NO: 386) | V (SEQ ID | NO: 774) | | NO: 1162) |
| | | | | NO: 580) | | | |
| 22 | AIP- | GFTFSKAW | RIKSVTNGE | TSSFCCRGGS | SGSSSNIG | KNNQRPS | STWDDSL |
| | 151090 | MS (SEQ | TTDYAAPVK | CPSHDTSYCG | SSSVS | (SEQ ID | SVRV |
| | | ID | G (SEQ ID | GQYKSYYYMD | (SEQ ID | NO: 969) | (SEQ ID |
| | | NO: 193) | NO: 386) | V (SEQ ID | NO: 775) | | NO: 1163) |
| | | | | NO: 581) | | | |
| 22 | AIP- | GFTFSKAW | RIKSVTDAE | TSSFCCRGGS | SGSSSNIG | KNNQRPS | STWDDSL |
| | 168083 | MS (SEQ | TTDYAAPVK | CPSHDTSYCG | SSSVS | (SEQ ID | SVRV |
| | | ID | G (SEQ ID | GQYKSYYYMD | (SEQ ID | NO: 970) | (SEQ ID |
| | | NO: 194) | NO: 388) | V (SEQ ID | NO: 776) | | NO: 1164) |
| | | | | NO: 582) | | | |
| 22 | AIP- | GFTFSKAW | RIKSVTDGQ | TSSFCCRGGS | SGSSSNIG | KNNQRPS | STWDDSL |
| | 161082 | MS (SEQ | TTDYAAPVK | CPSHDTSYCG | SSSVS | (SEQ ID | SVRV |
| | | ID | G (SEQ ID | GQYKSYYYMD | (SEQ ID | NO: 971) | (SEQ ID |
| | | NO: 195) | NO: 389) | V (SEQ ID | NO: 777) | | NO: 1165) |
| | | | | NO: 583) | | | |
| 22 | AIP- | GFTFSKAW | RIKSVTDGH | TSSFCCRGGS | SGSSSNIG | KNNQRPS | STWDDSL |
| | 114196 | MS (SEQ | TTDYAAPVK | CPSHDTSYCG | SSSVS | (SEQ ID | SVRV |
| | | ID | G (SEQ ID | GQYKSYYYMD | (SEQ ID | NO: 972) | (SEQ ID |
| | | NO: 196) | NO: 390) | V (SEQ ID | NO: 778) | | NO: 1166) |
| | | | | NO: 584) | | | |
| 22 | AIP- | GFTFSKAW | RIKSVTDGE | TSSFCCRGGS | SGSSSNIG | KNNQRPS | STWDDSL |
| | 189338 | MS (SEQ | QTDYAAPVK | CPSHDTSYCG | SSSVS | (SEQ ID | SVRV |
| | | ID | G (SEQ ID | GQYKSYYYMD | (SEQ ID | NO: 973) | (SEQ ID |
| | | NO: 197) | NO: 391) | V (SEQ ID | NO: 779) | | NO: 1167) |
| | | | | NO: 585) | | | |
| 22 | AIP- | GFTFSKAW | RIKSVTDGE | TSSFCCRGGS | SGSSSNIG | KNNQRPS | STWDDSL |
| | 183190 | MS (SEQ | ATDYAAPVK | CPSHDTSYCG | SSSVS | (SEQ ID | SVRV |
| | | ID | G (SEQ ID | GQYKSYYYMD | (SEQ ID | NO: 974) | (SEQ ID |
| | | NO: 198) | NO: 392) | V (SEQ ID | NO: 780) | | NO: 1168) |
| | | | | NO: 586) | | | |
| 22 | AIP- | GFTFSKAW | RIKSVTDGE | TSSFCCRGGS | SGSSSNIG | KNNQRPS | STWDDSL |
| | 110143 | MS (SEQ | TTDYASPVK | CPSHDTSYCG | SSSVS | (SEQ ID | SVRV |
| | | ID | G (SEQ ID | GQYKSYYYMD | (SEQ ID | NO: 975) | (SEQ ID |
| | | NO: 199) | NO: 393) | V (SEQ ID | NO: 781) | | NO: 1169) |
| | | | | NO: 587) | | | |
| 22 | AIP- | GFTFSKAW | RIKSVTDGE | TSSFCCRGGS | SGSSSNIG | KNNQRPS | STWDDSL |
| | 147176 | MS (SEQ | TTDYAAPVQ | CPSHDTSYCG | SSSVS | (SEQ ID | SVRV |
| | | ID | G (SEQ ID | GQYKSYYYMD | (SEQ ID | NO: 976) | (SEQ ID |
| | | NO: 200) | NO: 394) | V (SEQ ID | NO: 782) | | NO: 1170) |
| | | | | NO: 588) | | | |
| 22 | AIP- | GFTFSKAW | RIKSVTDGE | ISSFCCRGGS | SGSSSNIG | KNNQRPS | STWDDSL |
| | 134312 | MS (SEQ | TTDYAAPVK | CPSHDTSYCG | SSSVS | (SEQ ID | SVRV |
| | | ID | G (SEQ ID | GQYKSYYYMD | (SEQ ID | NO: 977) | (SEQ ID |
| | | NO: 201) | NO: 395) | V (SEQ ID | NO: 783) | | NO: 1171) |
| | | | | NO: 589) | | | |
| 22 | AIP- | GFTFSKAW | RIKSVTDGE | TTSFCCRGGS | SGSSSNIG | KNNQRPS | STWDDSL |
| | 128243 | MS (SEQ | TTDYAAPVK | CPSHDTSYCG | SSSVS | (SEQ ID | SVRV |
| | | ID | G (SEQ ID | GQYKSYYYMD | (SEQ ID | NO: 978) | (SEQ ID |
| | | NO: 202) | NO: 396) | V (SEQ ID | NO: 784) | | NO: 1172) |
| | | | | NO: 590) | | | |
| 23 | AIP- | GFTFSKAW | RIKSVTDGE | TSPFCCRGGS | SGSSSNIG | KNNQRPS | STWDDSL |
| | 156172 | MS (SEQ | TTDYAAPVK | CPSHDTSYCG | SSSVS | (SEQ ID | SVRV |
| | | ID | G (SEQ ID | GQYKSYYYMD | (SEQ ID | NO: 979) | (SEQ ID |
| | | NO: 203) | NO: 397) | V (SEQ ID | NO: 785) | | NO: 1173) |
| | | | | NO: 591) | | | |
| 23 | AIP- | GFTFSKAW | RIKSVTDGE | TSAFCCRGGS | SGSSSNIG | KNNQRPS | STWDDSL |
| | 147389 | MS (SEQ | TTDYAAPVK | CPSHDTSYCG | SSSVS | (SEQ ID | SVRV |
| | | ID | G (SEQ ID | GQYKSYYYMD | (SEQ ID | NO: 980) | (SEQ ID |
| | | NO: 204) | NO: 398) | V (SEQ ID | NO: 786) | | NO: 1174) |
| | | | | NO: 592) | | | |
| 23 | AIP- | GFTFSKAW | RIKSVTDGE | TSSYCCRGGS | SGSSSNIG | KNNQRPS | STWDDSL |
| | 124314 | MS (SEQ | TTDYAAPVK | CPSHDTSYCG | SSSVS | (SEQ ID | SVRV |
| | | ID | G (SEQ ID | GQYKSYYYMD | (SEQ ID | NO: 981) | (SEQ ID |
| | | NO: 205) | NO: 399) | V (SEQ ID | NO: 787) | | NO: 1175) |
| | | | | NO: 593) | | | |
| 23 | AIP- | GFTFSKAW | RIKSVTDGE | TSSFCCLGGS | SGSSSNIG | KNNQRPS | STWDDSL |
| | 185291 | MS (SEQ | TTDYAAPVK | CPSHDTSYCG | SSSVS | (SEQ ID | SVRV |
| | | ID | G (SEQ ID | GQYKSYYYMD | (SEQ ID | NO: 982) | (SEQ ID |
| | | NO: 206) | NO: 400) | V (SEQ ID | NO: 788) | | NO: 1176) |
| | | | | NO: 594) | | | |
| 23 | AIP- | GFTFSKAW | RIKSVTDGE | TSSFCCHGGS | SGSSSNIG | KNNQRPS | STWDDSL |
| | 135247 | MS (SEQ | TTDYAAPVK | CPSHDTSYCG | SSSVS | (SEQ ID | SVRV |
| | | ID | G (SEQ ID | GQYKSYYYMD | (SEQ ID | NO: 983) | (SEQ ID |
| | | NO: 207) | NO: 401) | V (SEQ ID | NO: 789) | | NO: 1177) |
| | | | | NO: 595) | | | |
| 23 | AIP- | GFTFSKAW | RIKSVTDGE | TSSFCCQGGS | SGSSSNIG | KNNQRPS | STWDDSL |
| | 113513 | MS (SEQ | TTDYAAPVK | CPSHDTSYCG | SSSVS | (SEQ ID | SVRV |
| | | ID | G (SEQ ID | GQYKSYYYMD | (SEQ ID | NO: 984) | (SEQ ID |
| | | NO: 208) | NO: 402) | V (SEQ ID | NO: 790) | | NO: 1178) |
| | | | | NO: 596) | | | |
| 23 | AIP- | GFTFSKAW | RIKSVTDGE | TSSFCCRSGS | SGSSSNIG | KNNQRPS | STWDDSL |
| | 102299 | MS (SEQ | TTDYAAPVK | CPSHDTSYCG | SSSVS | (SEQ ID | SVRV |
| | | ID | G (SEQ ID | GQYKSYYYMD | (SEQ ID | NO: 985) | (SEQ ID |
| | | NO: 209) | NO: 403) | V (SEQ ID | NO: 791) | | NO: 1179) |
| | | | | NO: 597) | | | |
| 23 | AIP- | GFTFSKAW | RIKSVTDGE | TSSFCCRGAS | SGSSSNIG | KNNQRPS | STWDDSL |
| | 179097 | MS (SEQ | TTDYAAPVK | CPSHDTSYCG | SSSVS | (SEQ ID | SVRV |
| | | ID | G (SEQ ID | GQYKSYYYMD | (SEQ ID | NO: 986) | (SEQ ID |
| | | NO: 210) | NO: 404) | V (SEQ ID | NO: 792) | | NO: 1180) |
| | | | | NO: 598) | | | |
| 23 | AIP- | GFTFSKAW | RIKSVTDGE | TSSFCCRGKS | SGSSSNIG | KNNQRPS | STWDDSL |
| | 109343 | MS (SEQ | TTDYAAPVK | CPSHDTSYCG | SSSVS | (SEQ ID | SVRV |
| | | ID | G (SEQ ID | GQYKSYYYMD | (SEQ ID | NO: 987) | (SEQ ID |
| | | NO: 211) | NO: 405) | V (SEQ ID | NO: 793) | | NO: 1181) |
| | | | | NO: 599) | | | |
| 23 | AIP- | GFTFSKAW | RIKSVTDGE | TSSFCCRGNS | SGSSSNIG | KNNQRPS | STWDDSL |
| | 119622 | MS (SEQ | TTDYAAPVK | CPSHDTSYCG | SSSVS | (SEQ ID | SVRV |
| | | ID | G (SEQ ID | GQYKSYYYMD | (SEQ ID | NO: 988) | (SEQ ID |
| | | NO: 212) | NO: 406) | V (SEQ ID | NO: 794) | | NO: 1182) |
| | | | | NO: 600) | | | |
| 24 | AIP- | GFTFSKAW | RIKSVTDGE | TSSFCCRGGN | SGSSSNIG | KNNQRPS | STWDDSL |
| | 191735 | MS (SEQ | TTDYAAPVK | CPSHDTSYCG | SSSVS | (SEQ ID | SVRV |
| | | ID | G (SEQ ID | GQYKSYYYMD | (SEQ ID | NO: 989) | (SEQ ID |
| | | NO: 213) | NO: 407) | V (SEQ ID | NO: 795) | | NO: 1183) |
| | | | | NO: 601) | | | |
| 24 | AIP- | GFTFSKAW | RIKSVTDGE | TSSFCCRGGQ | SGSSSNIG | KNNQRPS | STWDDSL |
| | 157078 | MS (SEQ | TTDYAAPVK | CPSHDTSYCG | SSSVS | (SEQ ID | SVRV |
| | | ID | G (SEQ ID | GQYKSYYYMD | (SEQ ID | NO: 990) | (SEQ ID |
| | | NO: 214) | NO: 408) | V (SEQ ID | NO: 796) | | NO: 1184) |
| | | | | NO: 602) | | | |
| 24 | AIP- | GFTFSKAW | RIKSVTDGE | TSSFCCRGGA | SGSSSNIG | KNNQRPS | STWDDSL |
| | 153475 | MS (SEQ | TTDYAAPVK | CPSHDTSYCG | SSSVS | (SEQ ID | SVRV |
| | | ID | G (SEQ ID | GQYKSYYYMD | (SEQ ID | NO: 991) | (SEQ ID |
| | | NO: 215) | NO: 409) | V (SEQ ID | NO: 797) | | NO: 1185) |
| | | | | NO: 603) | | | |
| 24 | AIP- | GFTFSKAW | RIKSVTDGE | TSSFCCRGGS | SGSSSNIG | KNNQRPS | STWDDSL |
| | 133650 | MS (SEQ | TTDYAAPVK | CASHDTSYCG | SSSVS | (SEQ ID | SVRV |
| | | ID | G (SEQ ID | GQYKSYYYMD | (SEQ ID | NO: 992) | (SEQ ID |
| | | NO: 216) | NO: 410) | V (SEQ ID | NO: 798) | | NO: 1186) |
| | | | | NO: 604) | | | |
| 24 | AIP- | GFTFSKAW | RIKSVTDGE | TSSFCCRGGS | SGSSSNIG | KNNQRPS | STWDDSL |
| | 190915 | MS (SEQ | TTDYAAPVK | CLSHDTSYCG | SSSVS | (SEQ ID | SVRV |
| | | ID | G (SEQ ID | GQYKSYYYMD | (SEQ ID | NO: 993) | (SEQ ID |
| | | NO: 217) | NO: 411) | V (SEQ ID | NO: 799) | | NO: 1187) |
| | | | | NO: 605) | | | |
| 24 | AIP- | GFTFSKAW | RIKSVTDGE | TSSFCCRGGS | SGSSSNIG | KNNQRPS | STWDDSL |
| | 105241 | MS (SEQ | TTDYAAPVK | CPAHDTSYCG | SSSVS | (SEQ ID | SVRV |
| | | ID | G (SEQ ID | GQYKSYYYMD | (SEQ ID | NO: 994) | (SEQ ID |
| | | NO: 218) | NO: 412) | V (SEQ ID | NO: 800) | | NO: 1188) |
| | | | | NO: 606) | | | |
| 24 | AIP- | GFTFSKAW | RIKSVTDGE | TSSFCCRGGS | SGSSSNIG | KNNQRPS | STWDDSL |
| | 167400 | MS (SEQ | TTDYAAPVK | CPNHDTSYCG | SSSVS | (SEQ ID | SVRV |
| | | ID | G (SEQ ID | GQYKSYYYMD | (SEQ ID | NO: 995) | (SEQ ID |
| | | NO: 219) | NO: 413) | V (SEQ ID | NO: 801) | | NO: 1189) |
| | | | | NO: 607) | | | |
| 24 | AIP- | GFTFSKAW | RIKSVTDGE | TSSFCCRGGS | SGSSSNIG | KNNQRPS | STWDDSL |
| | 109729 | MS (SEQ | TTDYAAPVK | CPSSDTSYCG | SSSVS | (SEQ ID | SVRV |
| | | ID | G (SEQ ID | GQYKSYYYMD | (SEQ ID | NO: 996) | (SEQ ID |
| | | NO: 220) | NO: 413) | V (SEQ ID | NO: 802) | | NO: 1190) |
| | | | | NO: 608) | | | |
| 24 | AIP- | GFTFSKAW | RIKSVTDGE | TSSFCCRGGS | SGSSSNIG | KNNQRPS | STWDDSL |
| | 151709 | MS (SEQ | TTDYAAPVK | CPSQDTSYCG | SSSVS | (SEQ ID | SVRV |
| | | ID | G (SEQ ID | GQYKSYYYMD | (SEQ ID | NO: 997) | (SEQ ID |
| | | NO: 221) | NO: 415) | V (SEQ ID | NO: 803) | | NO: 1191) |
| | | | | NO: 609) | | | |
| 24 | AIP- | GFTFSKAW | RIKSVTDGE | TSSFCCRGGS | SGSSSNIG | KNNQRPS | STWDDSL |
| | 137169 | MS (SEQ | TTDYAAPVK | CPSHETSYCG | SSSVS | (SEQ ID | SVRV |
| | | ID | G (SEQ ID | GQYKSYYYMD | (SEQ ID | NO: 998) | (SEQ ID |
| | | NO: 222) | NO: 416) | V (SEQ ID | NO: 804) | | NO: 1192) |
| | | | | NO: 610) | | | |
| 25 | AIP- | GFTFSKAW | RIKSVTDGE | TSSFCCRGGS | SGSSSNIG | KNNQRPS | STWDDSL |
| | 199616 | MS (SEQ | TTDYAAPVK | CPSHDQSYCG | SSSVS | (SEQ ID | SVRV |
| | | ID | G (SEQ ID | GQYKSYYYMD | (SEQ ID | NO: 999) | (SEQ ID |
| | | NO: 223) | NO: 417) | V (SEQ ID | NO: 805) | | NO: 1193) |
| | | | | NO: 611) | | | |
| 25 | AIP- | GFTFSKAW | RIKSVTDGE | TSSFCCRGGS | SGSSSNIG | KNNQRPS | STWDDSL |
| | 189296 | MS (SEQ | TTDYAAPVK | CPSHDTSMCG | SSSVS | (SEQ ID | SVRV |
| | | ID | G (SEQ ID | GQYKSYYYMD | (SEQ ID | NO: 1000) | (SEQ ID |
| | | NO: 224) | NO: 418) | V (SEQ ID | NO: 806) | | NO: 1194) |
| | | | | NO: 612) | | | |
| 25 | AIP- | GFTFSKAW | RIKSVTDGE | TSSFCCRGGS | SGSSSNIG | KNNQRPS | STWDDSL |
| | 152283 | MS (SEQ | TTDYAAPVK | CPSHDTSYCA | SSSVS | (SEQ ID | SVRV |
| | | ID | G (SEQ ID | GQYKSYYYMD | (SEQ ID | NO: 1001) | (SEQ ID |
| | | NO: 225) | NO: 419) | V (SEQ ID | NO: 807) | | NO: 1195) |
| | | | | NO: 613) | | | |
| 25 | AIP- | GFTFSKAW | RIKSVTDGE | TSSFCCRGGS | SGSSSNIG | KNNQRPS | STWDDSL |
| | 136628 | MS (SEQ | TTDYAAPVK | CPSHDTSYCN | SSSVS | (SEQ ID | SVRV |
| | | ID | G (SEQ ID | GQYKSYYYMD | (SEQ ID | NO: 1002) | (SEQ ID |
| | | NO: 226) | NO: 420) | V (SEQ ID | NO: 808) | | NO: 1196) |
| | | | | NO: 614) | | | |
| 25 | AIP- | GFTFSKAW | RIKSVTDGE | TSSFCCRGGS | SGSSSNIG | KNNQRPS | STWDDSL |
| | 100340 | MS (SEQ | TTDYAAPVK | CPSHDTSYCG | SSSVS | (SEQ ID | SVRV |
| | | ID | G (SEQ ID | NQYKSYYYMD | (SEQ ID | NO: 1003) | (SEQ ID |
| | | NO: 227) | NO: 421) | V (SEQ ID | NO: 809) | | NO: 1197) |
| | | | | NO: 615) | | | |
| 25 | AIP- | GFTFSKAW | RIKSVTDGE | TSSFCCRGGS | SGSSSNIG | KNNQRPS | STWDDSL |
| | 166959 | MS (SEQ | TTDYAAPVK | CPSHDTSYCG | SSSVS | (SEQ ID | SVRV |
| | | ID | G (SEQ ID | AQYKSYYYMD | (SEQ ID | NO: 1004) | (SEQ ID |
| | | NO: 228) | NO: 422) | V (SEQ ID | NO: 810) | | NO: 1198) |
| | | | | NO: 616) | | | |
| 25 | AIP- | GFTFSKAW | RIKSVTDGE | TSSFCCRGGS | SGSSSNIG | KNNQRPS | STWDDSL |
| | 190362 | MS (SEQ | TTDYAAPVK | CPSHDTSYCG | SSSVS | (SEQ ID | SVRV |
| | | ID | G (SEQ ID | GSYKSYYYMD | (SEQ ID | NO: 1005) | (SEQ ID |
| | | NO: 229) | NO: 423) | V (SEQ ID | NO: 811) | | NO: 1199) |
| | | | | NO: 617) | | | |
| 25 | AIP- | GFTFSKAW | RIKSVTDGE | TSSFCCRGGS | SGSSSNIG | KNNQRPS | STWDDSL |
| | 101601 | MS (SEQ | TTDYAAPVK | CPSHDTSYCG | SSSVS | (SEQ ID | SVRV |
| | | ID | G (SEQ ID | GYYKSYYYMD | (SEQ ID | NO: 1006) | (SEQ ID |
| | | NO: 230) | NO: 424) | V (SEQ ID | NO: 812) | | NO: 1200) |
| | | | | NO: 618) | | | |
| 25 | AIP- | GFTFSKAW | RIKSVTDGE | TSSFCCRGGS | SGSSSNIG | KNNQRPS | STWDDSL |
| | 159023 | MS (SEQ | TTDYAAPVK | CPSHDTSYCG | SSSVS | (SEQ ID | SVRV |
| | | ID | G (SEQ ID | GQFKSYYYMD | (SEQ ID | NO: 1007) | (SEQ ID |
| | | NO: 231) | NO: 425) | V (SEQ ID | NO: 813) | | NO: 1201) |
| | | | | NO: 619) | | | |
| 25 | AIP- | GFTFSKAW | RIKSVTDGE | TSSFCCRGGS | SGSSSNIG | KNNQRPS | STWDDSL |
| | 146871 | MS (SEQ | TTDYAAPVK | CPSHDTSYCG | SSSVS | (SEQ ID | SVRV |
| | | ID | G (SEQ ID | GQYPSYYYMD | (SEQ ID | NO: 1008) | (SEQ ID |
| | | NO: 232) | NO: 426) | V (SEQ ID | NO: 814) | | NO: 1202) |
| | | | | NO: 620) | | | |
| 26 | AIP- | GFTFSKAW | RIKSVTDGE | TSSFCCRGGS | SGSSSNIG | KNNQRPS | STWDDSL |
| | 170053 | MS (SEQ | TTDYAAPVK | CPSHDTSYCG | SSSVS | (SEQ ID | SVRV |
| | | ID | G (SEQ ID | GQYASYYYMD | (SEQ ID | NO: 1009) | (SEQ ID |
| | | NO: 233) | NO: 427) | V (SEQ ID | NO: 815) | | NO: 1203) |
| | | | | NO: 621) | | | |
| 26 | AIP- | GFTFSKAW | RIKSVTDGE | TSSFCCRGGS | SGSSSNIG | KNNQRPS | STWDDSL |
| | 199483 | MS (SEQ | TTDYAAPVK | CPSHDTSYCG | SSSVS | (SEQ ID | SVRV |
| | | ID | G (SEQ ID | GQYQSYYYMD | (SEQ ID | NO: 1010) | (SEQ ID |
| | | NO: 234) | NO: 428) | V (SEQ ID | NO: 816) | | NO: 1204) |
| | | | | NO: 622) | | | |
| 26 | AIP- | GFTFSKAW | RIKSVTDGE | TSSFCCRGGS | SGSSSNIG | KNNQRPS | STWDDSL |
| | 161048 | MS (SEQ | TTDYAAPVK | CPSHDTSYCG | SSSVS | (SEQ ID | SVRV |
| | | ID | G (SEQ ID | GQYKDYYYMD | (SEQ ID | NO: 1011) | (SEQ ID |
| | | NO: 235) | NO: 429) | V (SEQ ID | NO: 817) | | NO: 1205) |
| | | | | NO: 623) | | | |
| 26 | AIP- | GFTFSKAW | RIKSVTDGE | TSSFCCRGGS | SGSSSNIG | KNNQRPS | STWDDSL |
| | 162041 | MS (SEQ | TTDYAAPVK | CPSHDTSYCG | SSSVS | (SEQ ID | SVRV |
| | | ID | G (SEQ ID | GQYKSFYYMD | (SEQ ID | NO: 1012) | (SEQ ID |
| | | NO: 236) | NO: 430) | V (SEQ ID | NO: 818) | | NO: 1206) |
| | | | | NO: 624) | | | |
| 26 | AIP- | GFTFSKAW | RIKSVTDGE | TSSFCCRGGS | SGSSSNIG | KNNQRPS | STWDDSL |
| | 197886 | MS (SEQ | TTDYAAPVK | CPSHDTSYCG | SSSVS | (SEQ ID | SVRV |
| | | ID | G (SEQ ID | GQYKSYFYMD | (SEQ ID | NO: 1013) | (SEQ ID |
| | | NO: 237) | NO: 431) | V (SEQ ID | NO: 819) | | NO: 1207) |
| | | | | NO: 625) | | | |
| 26 | AIP- | GFTFSKAW | RIKSVTDGE | TSSFCCRGGS | SGSSSNIG | KNNQRPS | STWDDSL |
| | 183133 | MS (SEQ | TTDYAAPVK | CPSHDTSYCG | SSSVS | (SEQ ID | SVRV |
| | | ID | G (SEQ ID | GQYKSYYWMD | (SEQ ID | NO: 1014) | (SEQ ID |
| | | NO: 238) | NO: 432) | V (SEQ ID | NO: 820) | | NO: 1208) |
| | | | | NO: 626) | | | |
| 26 | AIP- | GFTFSKAW | RIKSVTDGE | TSSFCCRGGS | SGSSSNIG | KNNQRPS | STWDDSL |
| | 191470 | MS (SEQ | TTDYAAPVK | CPSHDTSYCG | SSSVS | (SEQ ID | SVRV |
| | | ID | G (SEQ ID | GQYKSYYLMD | (SEQ ID | NO: 1015) | (SEQ ID |
| | | NO: 239) | NO: 433) | V (SEQ ID | NO: 821) | | NO: 1209) |
| | | | | NO: 627) | | | |
| 26 | AIP- | GFTFSKAW | RIKSVTDGE | TSSFCCRGGS | SGSSSNIG | KNNQRPS | STWDDSL |
| | 151167 | MS (SEQ | TTDYAAPVK | CPSHDTSYCG | SSSVS | (SEQ ID | SVRV |
| | | ID | G (SEQ ID | GQYKSYYYVD | (SEQ ID | NO: 1016) | (SEQ ID |
| | | NO: 240) | NO: 434) | V (SEQ ID | NO: 822) | | NO: 1210) |
| | | | | NO: 628) | | | |
| 26 | AIP- | GFTFSKAW | RIKSVTDGE | TSSFCCRGGS | SGSSSNIG | KNNQRPS | STWDDSL |
| | 106633 | MS (SEQ | TTDYAAPVK | CPSHDTSYCG | SSSVS | (SEQ ID | SVRV |
| | | ID | G (SEQ ID | GQYKSYYYFD | (SEQ ID | NO: 1017) | (SEQ ID |
| | | NO: 241) | NO: 435) | V (SEQ ID | NO: 823) | | NO: 1211) |
| | | | | NO: 629) | | | |
| 26 | AIP- | GFTFSKAW | RIKSVTDGE | TSSFCCRGGS | SGSSSNIG | KNNQRPS | STWDDSL |
| | 102624 | MS (SEQ | TTDYAAPVK | CPSHDTSYCG | SSSVS | (SEQ ID | SVRV |
| | | ID | G (SEQ ID | GQYKSYYYMN | (SEQ ID | NO: 1018) | (SEQ ID |
| | | NO: 242) | NO: 436) | V (SEQ ID | NO: 824) | | NO: 1212) |
| | | | | NO: 630) | | | |
| 27 | AIP- | GFTFSKAW | RIKSVTDGE | TSSFCCRGGS | SGSSSNIG | KNNQRPS | STWDDSL |
| | 109484 | MS (SEQ | TTDYAAPVK | CPSHDTSYCG | SSSVS | (SEQ ID | SVRV |
| | | ID | G (SEQ ID | GQYKSYYYMD | (SEQ ID | NO: 1019) | (SEQ ID |
| | | NO: 243) | NO: 437) | I (SEQ ID | NO: 825) | | NO: 1213) |
| | | | | NO: 631) | | | |
| 27 | AIP- | GFTFSKAW | RIKSVTDGE | TSSFCCRGGS | SGSSSNIG | KNNQRPS | STWDDSL |
| | 164754 | MS (SEQ | TTDYAAPVK | CPSHDTSYCG | SSSVS | (SEQ ID | SVRV |
| | | ID | G (SEQ ID | GQYKSYYYMD | (SEQ ID | NO: 1020) | (SEQ ID |
| | | NO: 244) | NO: 438) | P (SEQ ID | NO: 826) | | NO: 1214) |
| | | | | NO: 632) | | | |
| 27 | AIP- | GFTFSKAW | RIKSVTDGE | TSSFCCRGGS | SGSSSNIG | KNNQRPS | STWDDSL |
| | 169676 | MS (SEQ | TTDYAAPVK | CPSHDTSYCG | SSSVS | (SEQ ID | SVRV |
| | | ID | G (SEQ ID | GQFKDYYYMD | (SEQ ID | NO: 1021) | (SEQ ID |
| | | NO: 245) | NO: 439) | V (SEQ ID | NO: 827) | | NO: 1215) |
| | | | | NO: 633) | | | |
| 27 | AIP- | GFTFSKAW | RIKSVTDGE | TSSFCCRGGS | SGSSSNIG | KNNQRPS | STWDDSL |
| | 177584 | MS (SEQ | TTDYAAPVK | CPSHDTSYCG | SSSVS | (SEQ ID | SVRV |
| | | ID | G (SEQ ID | GQSKQYYYMD | (SEQ ID | NO: 1022) | (SEQ ID |
| | | NO: 246) | NO: 440) | V (SEQ ID | NO: 828) | | NO: 1216) |
| | | | | NO: 634) | | | |
| 27 | AIP- | GFTFSKAW | RIKSVTDGE | TSSFCCRGGS | SGSSSNIG | KNNQRPS | STWDDSL |
| | 174676 | MS (SEQ | TTDYAAPVK | CPSHDTSYCG | SSSVS | (SEQ ID | SVRV |
| | | ID | G (SEQ ID | GQSKKYYYMD | (SEQ ID | NO: 1023) | (SEQ ID |
| | | NO: 247) | NO: 441) | V (SEQ ID | NO: 829) | | NO: 1217) |
| | | | | NO: 635) | | | |
| 27 | AIP- | GFTFSKAW | RIKSVTDGE | TSSFSCRGGS | SGSSSNIG | KNNQRPS | STWDDSL |
| | 120546 | MS (SEQ | TTDYAAPVK | CPSHDTSYSG | SSSVS | (SEQ ID | SVRV |
| | | ID | G (SEQ ID | GQYKSYYYMD | (SEQ ID | NO: 1024) | (SEQ ID |
| | | NO: 248) | NO: 442) | V (SEQ ID | NO: 830) | | NO: 1218) |
| | | | | NO: 636) | | | |
| 27 | AIP- | GFTFSKAW | RIKSVTDGE | TSSFACRGGS | SGSSSNIG | KNNQRPS | STWDDSL |
| | 186435 | MS (SEQ | TTDYAAPVK | CPSHDTSYVG | SSSVS | (SEQ ID | SVRV |
| | | ID | G (SEQ ID | GQYKSYYYMD | (SEQ ID | NO: 1025) | (SEQ ID |
| | | NO: 249) | NO: 443) | V (SEQ ID | NO: 831) | | NO: 1219) |
| | | | | NO: 637) | | | |
| 27 | AIP- | GFTFSKAW | RIKSVTDGE | TSSFCCRGNS | SGSSSNIG | KNNQRPS | STWDDSL |
| | 171074 | MS (SEQ | TTDYAAPVK | CPAHDTSYCG | SSSVS | (SEQ ID | SVRV |
| | | ID | G (SEQ ID | GQYPSYYYMD | (SEQ ID | NO: 1026) | (SEQ ID |
| | | NO: 250) | NO: 444) | V (SEQ ID | NO: 832) | | NO: 1220) |
| | | | | NO: 638) | | | |
| 27 | AIP- | GFTFSKAW | RIKSVTDGE | TSSYCCLGGS | SGSSSNIG | KNNQRPS | STWDDSL |
| | 163039 | MS (SEQ | TTDYAAPVK | CPSHDTSYCG | SSSVS | (SEQ ID | SVRV |
| | | ID | G (SEQ ID | GSYKSYYYMD | (SEQ ID | NO: 1027) | (SEQ ID |
| | | NO: 251) | NO: 445) | V (SEQ ID | NO: 833) | | NO: 1221) |
| | | | | NO: 639) | | | |
| 27 | AIP- | GFTFSKAW | RIKSVTDGE | TSSFCCRGKS | SGSSSNIG | KNNQRPS | STWDDSL |
| | 147652 | MS (SEQ | TTDYAAPVK | CPSHDNSYCG | SSSVS | (SEQ ID | SVRV |
| | | ID | G (SEQ ID | GQYASYYYMD | (SEQ ID | NO: 1028) | (SEQ ID |
| | | NO: 252) | NO: 446) | V (SEQ ID | NO: 834) | | NO: 1222) |
| | | | | NO: 640) | | | |
| 28 | AIP- | GFTFSKAW | RIKSVTDGE | TSSYCCRGGS | SGSSSNIG | KNNQRPS | STWDDSL |
| | 182061 | MS (SEQ | TTDYAAPVK | CPSHDTSYCG | SSSVS | (SEQ ID | SVRV |
| | | ID | G (SEQ ID | GQFKSYYYMD | (SEQ ID | NO: 1029) | (SEQ ID |
| | | NO: 253) | NO: 447) | P (SEQ ID | NO: 835) | | NO: 1223) |
| | | | | NO: 641) | | | |
| 28 | AIP- | GFTFSKAW | RIKSVTDGE | TSTFCCRGGS | SGSSSNIG | KNNQRPS | STWDDSL |
| | 172643 | MS (SEQ | TTDYAAPVK | CLSHDTSYCG | SSSVS | (SEQ ID | SVRV |
| | | ID | G (SEQ ID | GQYKSYYWMD | (SEQ ID | NO: 1030) | (SEQ ID |
| | | NO: 254) | NO: 448) | V (SEQ ID | NO: 836) | | NO: 1224) |
| | | | | NO: 642) | | | |
| 28 | AIP- | GFDFSKAW | RIKSVTDGQ | TSSFCCRGGS | TGSSSNIG | KNNQRPS | STWDDSL |
| | 171912 | MS (SEQ | TTDYAAPVK | CPSHDTSYCG | SSSVS | (SEQ ID | SVRV |
| | | ID | G (SEQ ID | GQYKSYYYMD | (SEQ ID | NO: 1031) | (SEQ ID |
| | | NO: 255) | NO: 449) | V (SEQ ID | NO: 837) | | NO: 1225) |
| | | | | NO: 643) | | | |
| 28 | AIP- | GFTFAKAW | RIKSVTDGE | TSSFCCRGGS | SGSSTNIG | KNNYRPS | STWDDSL |
| | 167833 | MS (SEQ | TTDYAAPVK | CPSHDTSYCG | SSSVS | (SEQ ID | SVRV |
| | | ID | G (SEQ ID | GQYKSYYYMD | (SEQ ID | NO: 1032) | (SEQ ID |
| | | NO: 256) | NO: 450) | V (SEQ ID | NO: 838) | | NO: 1226) |
| | | | | NO: 644) | | | |
| 28 | AIP- | GFDASKAW | RIKSVTDGE | TSSFCCRGGS | SGSSSNIG | KNNQRPS | STWDDSL |
| | 145518 | FT (SEQ | TTDYAAPVK | CPSHDTSYCG | SSSVS | (SEQ ID | SVRV |
| | | ID | G (SEQ ID | GQYKSYYYMD | (SEQ ID | NO: 1033) | (SEQ ID |
| | | NO: 257) | NO: 451) | V (SEQ ID | NO: 839) | | NO: 1227) |
| | | | | NO: 645) | | | |
| 28 | AIP- | GFTFSKAW | RIKSVTDGE | TSSFCCRGGS | TGSSSNIG | KNNQRPS | STWDDSL |
| | 143155 | MS (SEQ | TTDYAAPVK | CPSHDTSYCG | SSSVS | (SEQ ID | SVRV |
| | | ID | G (SEQ ID | GQYKSYYYMD | (SEQ ID | NO: 1034) | (SEQ ID |
| | | NO: 258) | NO: 452) | V (SEQ ID | NO: 840) | | NO: 1228) |
| | | | | NO: 646) | | | |
| 28 | AIP- | GFTFSKAW | RIKSVTDGE | TSSFCCRGGS | SGASSNIG | KNNQRPS | STWDDSL |
| | 119664 | MS (SEQ | TTDYAAPVK | CPSHDTSYCG | SSSVS | (SEQ ID | SVRV |
| | | ID | G (SEQ ID | GQYKSYYYMD | (SEQ ID | NO: 1035) | (SEQ ID |
| | | NO: 259) | NO: 453) | V (SEQ ID | NO: 841) | | NO: 1229) |
| | | | | NO: 647) | | | |
| 28 | AIP- | GFTFSKAW | RIKSVTDGE | TSSFCCRGGS | SGSPSNIG | KNNQRPS | STWDDSL |
| | 190526 | MS (SEQ | TTDYAAPVK | CPSHDTSYCG | SSSVS | (SEQ ID | SVRV |
| | | ID | G (SEQ ID | GQYKSYYYMD | (SEQ ID | NO: 1036) | (SEQ ID |
| | | NO: 260) | NO: 454) | V (SEQ ID | NO: 842) | | NO: 1230) |
| | | | | NO: 648) | | | |
| 28 | AIP- | GFTFSKAW | RIKSVTDGE | TSSFCCRGGS | SGSKSNIG | KNNQRPS | STWDDSL |
| | 114403 | MS (SEQ | TTDYAAPVK | CPSHDTSYCG | SSSVS | (SEQ ID | SVRV |
| | | ID | G (SEQ ID | GQYKSYYYMD | (SEQ ID | NO: 1037) | (SEQ ID |
| | | NO: 261) | NO: 455) | V (SEQ ID | NO: 843) | | NO: 1231) |
| | | | | NO: 649) | | | |
| 28 | AIP- | GFTFSKAW | RIKSVTDGE | TSSFCCRGGS | SGSSTNIG | KNNQRPS | STWDDSL |
| | 156760 | MS (SEQ | TTDYAAPVK | CPSHDTSYCG | SSSVS | (SEQ ID | SVRV |
| | | ID | G (SEQ ID | GQYKSYYYMD | (SEQ ID | NO: 1038) | (SEQ ID |
| | | NO: 262) | NO: 456) | V (SEQ ID | NO: 844) | | NO: 1232) |
| | | | | NO: 650) | | | |
| 29 | AIP- | GFTFSKAW | RIKSVTDGE | TSSFCCRGGS | SGSSSDIG | KNNQRPS | STWDDSL |
| | 103803 | MS (SEQ | TTDYAAPVK | CPSHDTSYCG | SSSVS | (SEQ ID | SVRV |
| | | ID | G (SEQ ID | GQYKSYYYMD | (SEQ ID | NO: 1039) | (SEQ ID |
| | | NO: 263) | NO: 457) | V (SEQ ID | NO: 845) | | NO: 1233) |
| | | | | NO: 651) | | | |
| 29 | AIP- | GFTFSKAW | RIKSVTDGE | TSSFCCRGGS | SGSSSNIQ | KNNQRPS | STWDDSL |
| | 182722 | MS (SEQ | TTDYAAPVK | CPSHDTSYCG | SSSVS | (SEQ ID | SVRV |
| | | ID | G (SEQ ID | GQYKSYYYMD | (SEQ ID | NO: 1040) | (SEQ ID |
| | | NO: 264) | NO: 458) | V (SEQ ID | NO: 846) | | NO: 1234) |
| | | | | NO: 652) | | | |
| 29 | AIP- | GFTFSKAW | RIKSVTDGE | TSSFCCRGGS | SGSSSNIG | KNNQRPS | STWDDSL |
| | 195588 | MS (SEQ | TTDYAAPVK | CPSHDTSYCG | HSSVS | (SEQ ID | SVRV |
| | | ID | G (SEQ ID | GQYKSYYYMD | (SEQ ID | NO: 1041) | (SEQ ID |
| | | NO: 265) | NO: 459) | V (SEQ ID | NO: 847) | | NO: 1235) |
| | | | | NO: 653) | | | |
| 29 | AIP- | GFTFSKAW | RIKSVTDGE | TSSFCCRGGS | SGSSSNIG | KNNQRPS | STWDDSL |
| | 145722 | MS (SEQ | TTDYAAPVK | CPSHDTSYCG | STSVS | (SEQ ID | SVRV |
| | | ID | G (SEQ ID | GQYKSYYYMD | (SEQ ID | NO: 1042) | (SEQ ID |
| | | NO: 266) | NO: 460) | V (SEQ ID | NO: 848) | | NO: 1236) |
| | | | | NO: 654) | | | |
| 29 | AIP- | GFTFSKAW | RIKSVTDGE | TSSFCCRGGS | SGSSSNIG | KNNQRPS | STWDDSL |
| | 178251 | MS (SEQ | TTDYAAPVK | CPSHDTSYCG | SNSVS | (SEQ ID | SVRV |
| | | ID | G (SEQ ID | GQYKSYYYMD | (SEQ ID | NO: 1043) | (SEQ ID |
| | | NO: 267) | NO: 461) | V (SEQ ID | NO: 849) | | NO: 1237) |
| | | | | NO: 655) | | | |
| 29 | AIP- | GFTFSKAW | RIKSVTDGE | TSSFCCRGGS | SGSSSNIG | KNNQRPS | STWDDSL |
| | 116142 | MS (SEQ | TTDYAAPVK | CPSHDTSYCG | SASVS | (SEQ ID | SVRV |
| | | ID | G (SEQ ID | GQYKSYYYMD | (SEQ ID | NO: 1044) | (SEQ ID |
| | | NO: 268) | NO: 462) | V (SEQ ID | NO: 850) | | NO: 1238) |
| | | | | NO: 656) | | | |
| 29 | AIP- | GFTFSKAW | RIKSVTDGE | TSSFCCRGGS | SGSSSNIG | KNNQRPS | STWDDSL |
| | 183350 | MS (SEQ | TTDYAAPVK | CPSHDTSYCG | SSTVS | (SEQ ID | SVRV |
| | | ID | G (SEQ ID | GQYKSYYYMD | (SEQ ID | NO: 1045) | (SEQ ID |
| | | NO: 269) | NO: 463) | V (SEQ ID | NO: 851) | | NO: 1239) |
| | | | | NO: 657) | | | |
| 29 | AIP- | GFTFSKAW | RIKSVTDGE | TSSFCCRGGS | SGSSSNIG | KNNQRPS | STWDDSL |
| | 127108 | MS (SEQ | TTDYAAPVK | CPSHDTSYCG | SSAVS | (SEQ ID | SVRV |
| | | ID | G (SEQ ID | GQYKSYYYMD | (SEQ ID | NO: 1046) | (SEQ ID |
| | | NO: 270) | NO: 464) | V (SEQ ID | NO: 852) | | NO: 1240) |
| | | | | NO: 658) | | | |
| 29 | AIP- | GFTFSKAW | RIKSVTDGE | TSSFCCRGGS | SGSSSNIG | KNNQRPS | STWDDSL |
| | 128147 | MS (SEQ | TTDYAAPVK | CPSHDTSYCG | SSYVS | (SEQ ID | SVRV |
| | | ID | G (SEQ ID | GQYKSYYYMD | (SEQ ID | NO: 1047) | (SEQ ID |
| | | NO: 271) | NO: 465) | V (SEQ ID | NO: 853) | | NO: 1241) |
| | | | | NO: 659) | | | |
| 29 | AIP- | GFTFSKAW | RIKSVTDGE | TSSFCCRGGS | SGSSSNIG | KNNQRPS | STWDDSL |
| | 109510 | MS (SEQ | TTDYAAPVK | CPSHDTSYCG | SSSTS | (SEQ ID | SVRV |
| | | ID | G (SEQ ID | GQYKSYYYMD | (SEQ ID | NO: 1048) | (SEQ ID |
| | | NO: 272) | NO: 466) | V (SEQ ID | NO: 854) | | NO: 1242) |
| | | | | NO: 660) | | | |
| 30 | AIP- | GFTFSKAW | RIKSVTDGE | TSSFCCRGGS | SGSSSNIG | KNNQRPS | STWDDSL |
| | 104086 | MS (SEQ | TTDYAAPVK | CPSHDTSYCG | SSSVA | (SEQ ID | SVRV |
| | | ID | G (SEQ ID | GQYKSYYYMD | (SEQ ID | NO: 1049) | (SEQ ID |
| | | NO: 273) | NO: 467) | V (SEQ ID | NO: 855) | | NO: 1243) |
| | | | | NO: 661) | | | |
| 30 | AIP- | GFTFSKAW | RIKSVTDGE | TSSFCCRGGS | SGSSSNIG | KNNQRPS | STWDDSL |
| | 143132 | MS (SEQ | TTDYAAPVK | CPSHDTSYCG | SSSVT | (SEQ ID | SVRV |
| | | ID | G (SEQ ID | GQYKSYYYMD | (SEQ ID | NO: 1050) | (SEQ ID |
| | | NO: 274) | NO: 468) | V (SEQ ID | NO: 856) | | NO: 1244) |
| | | | | NO: 662) | | | |
| 30 | AIP- | GFTFSKAW | RIKSVTDGE | TSSFCCRGGS | SGSSSNIG | RNNQRPS | STWDDSL |
| | 169636 | MS (SEQ | TTDYAAPVK | CPSHDTSYCG | SSSVS | (SEQ ID | SVRV |
| | | ID | G (SEQ ID | GQYKSYYYMD | (SEQ ID | NO: 1051) | (SEQ ID |
| | | NO: 275) | NO: 469) | V (SEQ ID | NO: 857) | | NO: 1245) |
| | | | | NO: 663) | | | |
| 30 | AIP- | GFTFSKAW | RIKSVTDGE | TSSFCCRGGS | SGSSSNIG | NNNQRPS | STWDDSL |
| | 152243 | MS (SEQ | TTDYAAPVK | CPSHDTSYCG | SSSVS | (SEQ ID | SVRV |
| | | ID | G (SEQ ID | GQYKSYYYMD | (SEQ ID | NO: 1052) | (SEQ ID |
| | | NO: 276) | NO: 470) | V (SEQ ID | NO: 858) | | NO: 1246) |
| | | | | NO: 664) | | | |
| 30 | AIP- | GFTFSKAW | RIKSVTDGE | TSSFCCRGGS | SGSSSNIG | MNNQRPS | STWDDSL |
| | 138776 | MS (SEQ | TTDYAAPVK | CPSHDTSYCG | SSSVS | (SEQ ID | SVRV |
| | | ID | G (SEQ ID | GQYKSYYYMD | (SEQ ID | NO: 1053) | (SEQ ID |
| | | NO: 277) | NO: 471) | V (SEQ ID | NO: 859) | | NO: 1247) |
| | | | | NO: 665) | | | |
| 30 | AIP- | GFTFSKAW | RIKSVTDGE | TSSFCCRGGS | SGSSSNIG | ANNQRPS | STWDDSL |
| | 103817 | MS (SEQ | TTDYAAPVK | CPSHDTSYCG | SSSVS | (SEQ ID | SVRV |
| | | ID | G (SEQ ID | GQYKSYYYMD | (SEQ ID | NO: 1054) | (SEQ ID |
| | | NO: 278) | NO: 472) | V (SEQ ID | NO: 860) | | NO: 1248) |
| | | | | NO: 666) | | | |
| 30 | AIP- | GFTFSKAW | RIKSVTDGE | TSSFCCRGGS | SGSSSNIG | HNNQRPS | STWDDSL |
| | 130491 | MS (SEQ | TTDYAAPVK | CPSHDTSYCG | SSSVS | (SEQ ID | SVRV |
| | | ID | G (SEQ ID | GQYKSYYYMD | (SEQ ID | NO: 1055) | (SEQ ID |
| | | NO: 279) | NO: 473) | V (SEQ ID | NO: 861) | | NO: 1249) |
| | | | | NO: 667) | | | |
| 30 | AIP- | GFTFSKAW | RIKSVTDGE | TSSFCCRGGS | SGSSSNIG | KDNQRPS | STWDDSL |
| | 188155 | MS (SEQ | TTDYAAPVK | CPSHDTSYCG | SSSVS | (SEQ ID | SVRV |
| | | ID | G (SEQ ID | GQYKSYYYMD | (SEQ ID | NO: 1056) | (SEQ ID |
| | | NO: 280) | NO: 474) | V (SEQ ID | NO: 862) | | NO: 1250) |
| | | | | NO: 668) | | | |
| 30 | AIP- | GFTFSKAW | RIKSVTDGE | TSSFCCRGGS | SGSSSNIG | KNTQRPS | STWDDSL |
| | 167246 | MS (SEQ | TTDYAAPVK | CPSHDTSYCG | SSSVS | (SEQ ID | SVRV |
| | | ID | G (SEQ ID | GQYKSYYYMD | (SEQ ID | NO: 1057) | (SEQ ID |
| | | NO: 281) | NO: 475) | V (SEQ ID | NO: 863) | | NO: 1251) |
| | | | | NO: 669) | | | |
| 30 | AIP- | GFTFSKAW | RIKSVTDGE | TSSFCCRGGS | SGSSSNIG | KNNYRPS | STWDDSL |
| | 106139 | MS (SEQ | TTDYAAPVK | CPSHDTSYCG | SSSVS | (SEQ ID | SVRV |
| | | ID | G (SEQ ID | GQYKSYYYMD | (SEQ ID | NO: 1058) | (SEQ ID |
| | | NO: 282) | NO: 476) | V (SEQ ID | NO: 864) | | NO: 1252) |
| | | | | NO: 670) | | | |
| 31 | AIP- | GFTFSKAW | RIKSVTDGE | TSSFCCRGGS | SGSSSNIG | KNNARPS | STWDDSL |
| | 198351 | MS (SEQ | TTDYAAPVK | CPSHDTSYCG | SSSVS | (SEQ ID | SVRV |
| | | ID | G (SEQ ID | GQYKSYYYMD | (SEQ ID | NO: 1059) | (SEQ ID |
| | | NO: 283) | NO: 477) | V (SEQ ID | NO: 865) | | NO: 1253) |
| | | | | NO: 671) | | | |
| 31 | AIP- | GFTFSKAW | RIKSVTDGE | TSSFCCRGGS | SGSSSNIG | KNNLRPS | STWDDSL |
| | 159326 | MS (SEQ | TTDYAAPVK | CPSHDTSYCG | SSSVS | (SEQ ID | SVRV |
| | | ID | G (SEQ ID | GQYKSYYYMD | (SEQ ID | NO: 1060) | (SEQ ID |
| | | NO: 284) | NO: 478) | V (SEQ ID | NO: 866) | | NO: 1254) |
| | | | | NO: 672) | | | |
| 31 | AIP- | GFTFSKAW | RIKSVTDGE | TSSFCCRGGS | SGSSSNIG | KNNQQPS | STWDDSL |
| | 192275 | MS (SEQ | TTDYAAPVK | CPSHDTSYCG | SSSVS | (SEQ ID | SVRV |
| | | ID | G (SEQ ID | GQYKSYYYMD | (SEQ ID | NO: 1061) | (SEQ ID |
| | | NO: 285) | NO: 479) | V (SEQ ID | NO: 867) | | NO: 1255) |
| | | | | NO: 673) | | | |
| 31 | AIP- | GFTFSKAW | RIKSVTDGE | TSSFCCRGGS | SGSSSNIG | KNNQRAS | STWDDSL |
| | 190761 | MS (SEQ | TTDYAAPVK | CPSHDTSYCG | SSSVS | (SEQ ID | SVRV |
| | | ID | G (SEQ ID | GQYKSYYYMD | (SEQ ID | NO: 1062) | (SEQ ID |
| | | NO: 286) | NO: 480) | V (SEQ ID | NO: 868) | | NO: 1256) |
| | | | | NO: 674) | | | |
| 31 | AIP- | GFTFSKAW | RIKSVTDGE | TSSFCCRGGS | SGSSSNIG | KNNQRPY | STWDDSL |
| | 166832 | MS (SEQ | TTDYAAPVK | CPSHDTSYCG | SSSVS | (SEQ ID | SVRV |
| | | ID | G (SEQ ID | GQYKSYYYMD | (SEQ ID | NO: 1063) | (SEQ ID |
| | | NO: 287) | NO: 481) | V (SEQ ID | NO: 869) | | NO: 1257) |
| | | | | NO: 675) | | | |
| 31 | AIP- | GFTFSKAW | RIKSVTDGE | TSSFCCRGGS | SGSSSNIG | KNNQRPL | STWDDSL |
| | 148062 | MS (SEQ | TTDYAAPVK | CPSHDTSYCG | SSSVS | (SEQ ID | SVRV |
| | | ID | G (SEQ ID | GQYKSYYYMD | (SEQ ID | NO: 1064) | (SEQ ID |
| | | NO: 288) | NO: 482) | V (SEQ ID | NO: 870) | | NO: 1258) |
| | | | | NO: 676) | | | |
| 31 | AIP- | GFTFSKAW | RIKSVTDGE | TSSFCCRGGS | SGSSSNIG | KNNQRPS | ATWDDSL |
| | 129145 | MS (SEQ | TTDYAAPVK | CPSHDTSYCG | SSSVS | (SEQ ID | SVRV |
| | | ID | G (SEQ ID | GQYKSYYYMD | (SEQ ID | NO: 1065) | (SEQ ID |
| | | NO: 289) | NO: 483) | V (SEQ ID | NO: 871) | | NO: 1259) |
| | | | | NO: 677) | | | |
| 31 | AIP- | GFTFSKAW | RIKSVTDGE | TSSFCCRGGS | SGSSSNIG | KNNQRPS | SSWDDSL |
| | 111240 | MS (SEQ | TTDYAAPVK | CPSHDTSYCG | SSSVS | (SEQ ID | SVRV |
| | | ID | G (SEQ ID | GQYKSYYYMD | (SEQ ID | NO: 1066) | (SEQ ID |
| | | NO: 290) | NO: 484) | V (SEQ ID | NO: 872) | | NO: 1260) |
| | | | | NO: 678) | | | |
| 31 | AIP- | GFTFSKAW | RIKSVTDGE | TSSFCCRGGS | SGSSSNIG | KNNQRPS | STFDDSL |
| | 190749 | MS (SEQ | TTDYAAPVK | CPSHDTSYCG | SSSVS | (SEQ ID | SVRV |
| | | ID | G (SEQ ID | GQYKSYYYMD | (SEQ ID | NO: 1067) | (SEQ ID |
| | | NO: 291) | NO: 485) | V (SEQ ID | NO: 873) | | NO: 1261) |
| | | | | NO: 679) | | | |
| 31 | AIP- | GFTFSKAW | RIKSVTDGE | TSSFCCRGGS | SGSSSNIG | KNNQRPS | STWDNSL |
| | 153888 | MS (SEQ | TTDYAAPVK | CPSHDTSYCG | SSSVS | (SEQ ID | SVRV |
| | | ID | G (SEQ ID | GQYKSYYYMD | (SEQ ID | NO: 1068) | (SEQ ID |
| | | NO: 292) | NO: 486) | V (SEQ ID | NO: 874) | | NO: 1262) |
| | | | | NO: 680) | | | |
| 32 | AIP- | GFTFSKAW | RIKSVTDGE | TSSFCCRGGS | SGSSSNIG | KNNQRPS | STWDDQL |
| | 130915 | MS (SEQ | TTDYAAPVK | CPSHDTSYCG | SSSVS | (SEQ ID | SVRV |
| | | ID | G (SEQ ID | GQYKSYYYMD | (SEQ ID | NO: 1069) | (SEQ ID |
| | | NO: 293) | NO: 487) | V (SEQ ID | NO: 875) | | NO: 1263) |
| | | | | NO: 681) | | | |
| 32 | AIP- | GFTFSKAW | RIKSVTDGE | TSSFCCRGGS | SGSSSNIG | KNNQRPS | STWDDAL |
| | 109048 | MS (SEQ | TTDYAAPVK | CPSHDTSYCG | SSSVS | (SEQ ID | SVRV |
| | | ID | G (SEQ ID | GQYKSYYYMD | (SEQ ID | NO: 1070) | (SEQ ID |
| | | NO: 294) | NO: 488) | V (SEQ ID | NO: 876) | | NO: 1264) |
| | | | | NO: 682) | | | |
| 32 | AIP- | GFTFSKAW | RIKSVTDGE | TSSFCCRGGS | SGSSSNIG | KNNQRPS | STWDDDL |
| | 170569 | MS (SEQ | TTDYAAPVK | CPSHDTSYCG | SSSVS | (SEQ ID | SVRV |
| | | ID | G (SEQ ID | GQYKSYYYMD | (SEQ ID | NO: 1071) | (SEQ ID |
| | | NO: 295) | NO: 489) | V (SEQ ID | NO: 877) | | NO: 1265) |
| | | | | NO: 683) | | | |
| 32 | AIP- | GFTFSKAW | RIKSVTDGE | TSSFCCRGGS | SGSSSNIG | KNNQRPS | STWDDSN |
| | 154873 | MS (SEQ | TTDYAAPVK | CPSHDTSYCG | SSSVS | (SEQ ID | SVRV |
| | | ID | G (SEQ ID | GQYKSYYYMD | (SEQ ID | NO: 1072) | (SEQ ID |
| | | NO: 296) | NO: 490) | V (SEQ ID | NO: 878) | | NO: 1266) |
| | | | | NO: 684) | | | |
| 32 | AIP- | GFTFSKAW | RIKSVTDGE | TSSFCCRGGS | SGSSSNIG | KNNQRPS | STWDDSS |
| | 159037 | MS (SEQ | TTDYAAPVK | CPSHDTSYCG | SSSVS | (SEQ ID | SVRV |
| | | ID | G (SEQ ID | GQYKSYYYMD | (SEQ ID | NO: 1073) | (SEQ ID |
| | | NO: 297) | NO: 491) | V (SEQ ID | NO: 879) | | NO: 1267) |
| | | | | NO: 685) | | | |
| 32 | AIP- | GFTFSKAW | RIKSVTDGE | TSSFCCRGGS | SGSSSNIG | KNNQRPS | STWDDSL |
| | 186826 | MS (SEQ | TTDYAAPVK | CPSHDTSYCG | SSSVS | (SEQ ID | NVRV |
| | | ID | G (SEQ ID | GQYKSYYYMD | (SEQ ID | NO: 1074) | (SEQ ID |
| | | NO: 298) | NO: 492) | V (SEQ ID | NO: 880) | | NO: 1268) |
| | | | | NO: 686) | | | |
| 32 | AIP- | GFTFSKAW | RIKSVTDGE | TSSFCCRGGS | SGSSSNIG | KNNQRPS | STWDDSL |
| | 156514 | MS (SEQ | TTDYAAPVK | CPSHDTSYCG | SSSVS | (SEQ ID | LVRV |
| | | ID | G (SEQ ID | GQYKSYYYMD | (SEQ ID | NO: 1075) | (SEQ ID |
| | | NO: 299) | NO: 493) | V (SEQ ID | NO: 881) | | NO: 1269) |
| | | | | NO: 687) | | | |
| 32 | AIP- | GFTFSKAW | RIKSVTDGE | TSSFCCRGGS | SGSSSNIG | KNNQRPS | STWDDSL |
| | 157122 | MS (SEQ | TTDYAAPVK | CPSHDTSYCG | SSSVS | (SEQ ID | TVRV |
| | | ID | G (SEQ ID | GQYKSYYYMD | (SEQ ID | NO: 1076) | (SEQ ID |
| | | NO: 300) | NO: 494) | V (SEQ ID | NO: 882) | | NO: 1270) |
| | | | | NO: 688) | | | |
| 32 | AIP- | GFTFSKAW | RIKSVTDGE | TSSFCCRGGS | SGSSSNIG | KNNQRPS | STWDDSL |
| | 173276 | MS (SEQ | TTDYAAPVK | CPSHDTSYCG | SSSVS | (SEQ ID | SIRV |
| | | ID | G (SEQ ID | GQYKSYYYMD | (SEQ ID | NO: 1077) | (SEQ ID |
| | | NO: 301) | NO: 495) | V (SEQ ID | NO: 883) | | NO: 1271) |
| | | | | NO: 689) | | | |
| 32 | AIP- | GFTFSKAW | RIKSVTDGE | TSSFCCRGGS | SGSSSNIG | KNNQRPS | STWDDSL |
| | 150485 | MS (SEQ | TTDYAAPVK | CPSHDTSYCG | SSSVS | (SEQ ID | SVKV |
| | | ID | G (SEQ ID | GQYKSYYYMD | (SEQ ID | NO: 1078) | (SEQ ID |
| | | NO: 302) | NO: 496) | V (SEQ ID | NO: 884) | | NO: 1272) |
| | | | | NO: 690) | | | |
| 33 | AIP- | GFTFSKAW | RIKSVTDGE | TSSFCCRGGS | SGSSSNIG | KNNQRPS | STWDDSL |
| | 135679 | MS (SEQ | TTDYAAPVK | CPSHDTSYCG | SSSVS | (SEQ ID | SVWV |
| | | ID | G (SEQ ID | GQYKSYYYMD | (SEQ ID | NO: 1079) | (SEQ ID |
| | | NO: 303) | NO: 497) | V (SEQ ID | NO: 885) | | NO: 1273) |
| | | | | NO: 691) | | | |
| 33 | AIP- | GFTFSKAW | RIKSVTDGE | TSSFCCRGGS | SGSSSNIG | KNNQRPS | STWDDSL |
| | 166847 | MS (SEQ | TTDYAAPVK | CPSHDTSYCG | SSSVS | (SEQ ID | SVHV |
| | | ID | G (SEQ ID | GQYKSYYYMD | (SEQ ID | NO: 1080) | (SEQ ID |
| | | NO: 304) | NO: 498) | V (SEQ ID | NO: 886) | | NO: 1274) |
| | | | | NO: 692) | | | |
| 33 | AIP- | GFTFSKAW | RIKSVTDGE | TSSFCCRGGS | SGSSSNIG | KNNQRPS | STWDDSL |
| | 124013 | MS (SEQ | TTDYAAPVK | CPSHDTSYCG | SSSVS | (SEQ ID | SVQV |
| | | ID | G (SEQ ID | GQYKSYYYMD | (SEQ ID | NO: 1081) | (SEQ ID |
| | | NO: 305) | NO: 499) | V (SEQ ID | NO: 887) | | NO: 1275) |
| | | | | NO: 693) | | | |
| 33 | AIP- | GFTFSKAW | RIKSVTDGE | TSSFCCRGGS | SGSSSNIG | KNNQRPS | STWDDSL |
| | 126285 | MS (SEQ | TTDYAAPVK | CPSHDTSYCG | SSSVS | (SEQ ID | SVRI |
| | | ID | G (SEQ ID | GQYKSYYYMD | (SEQ ID | NO: 1082) | (SEQ ID |
| | | NO: 306) | NO: 500) | V (SEQ ID | NO: 888) | | NO: 1276) |
| | | | | NO: 694) | | | |
| 33 | AIP- | GFTFSKAW | RIKSVTDGE | TSSFCCRGGS | SGSSSDIG | KNNQRPS | STWNDQL |
| | 190274 | MS (SEQ | TTDYAAPVK | CPSHDTSYCG | SSSVS | (SEQ ID | SVRV |
| | | ID | G (SEQ ID | GQYKSYYYMD | (SEQ ID | NO: 1083) | (SEQ ID |
| | | NO: 307) | NO: 501) | V (SEQ ID | NO: 889) | | NO: 1277) |
| | | | | NO: 695) | | | |
| 33 | AIP- | GFTFSKAW | RIKSVTDGE | TSSFCCRGGS | SGSSSDIG | KNNQRPS | STWDDSL |
| | 150277 | MS (SEQ | TTDYAAPVK | CPSHDTSYCG | SHDVL | (SEQ ID | SVRV |
| | | ID | G (SEQ ID | GQYKSYYYMD | (SEQ ID | NO: 1084) | (SEQ ID |
| | | NO: 308) | NO: 502) | V (SEQ ID | NO: 890) | | NO: 1278) |
| | | | | NO: 696) | | | |
| 33 | AIP- | GFTFSKAW | RIKSVTDGE | TSSFCCRGGS | SGSSSNIG | KNNQRPS | STWDDSL |
| | 104364 | YS (SEQ | TTDYAAPVK | CPSHDTSYCG | SSSVS | (SEQ ID | SVRV |
| | | ID | G (SEQ ID | GQYKSYYYMD | (SEQ ID | NO: 1085) | (SEQ ID |
| | | NO: 309) | NO: 503) | V (SEQ ID | NO: 891) | | NO: 1279) |
| | | | | NO: 697) | | | |
| 33 | AIP- | GFTFSKAW | RIKSVTDGE | TSSFCCRGGS | SGSSSNIG | KNNQRPS | STWDDSL |
| | 180422 | MS (SEQ | TTEYAASVK | CPSHDTSYCG | SSSVS | (SEQ ID | SVRV |
| | | ID | G (SEQ ID | GQYKSYYYMD | (SEQ ID | NO: 1086) | (SEQ ID |
| | | NO: 310) | NO: 504) | V (SEQ ID | NO: 892) | | NO: 1280) |
| | | | | NO: 698) | | | |
| 33 | AIP- | GFTFSKAW | RIKSVTDGE | TSSFCCRGGS | SGSSSNIG | KNNQRPS | STWDDSL |
| | 166722 | MS (SEQ | TTEYAASVK | CPSHDTSYCG | SSSVS | (SEQ ID | SVRV |
| | | ID | G (SEQ ID | GQYKSYYYMD | (SEQ ID | NO: 1087) | (SEQ ID |
| | | NO: 311) | NO: 505) | V (SEQ ID | NO: 893) | | NO: 1281) |
| | | | | NO: 699) | | | |
| 33 | AIP- | GFTFSKAW | FIKSVTDGE | TSSFCCRGGS | SGSSSNIG | KNNQRPS | STWDDSL |
| | 193490 | MS (SEQ | TTEYAASVK | CPSHDTSYCG | SSSVS | (SEQ ID | SVRV |
| | | ID | G (SEQ ID | GQYKSYYYMD | (SEQ ID | NO: 1088) | (SEQ ID |
| | | NO: 312) | NO: 506) | V (SEQ ID | NO: 894) | | NO: 1282) |
| | | | | NO: 700) | | | |
| 34 | AIP- | GFTFSKAW | RIKSVTDGE | TSSYCCRSGS | SGSSSNIG | KNNQRPS | STWDDSL |
| | 129967 | MS (SEQ | TTDYAAPVK | CPSSDTSYCN | SSSVS | (SEQ ID | SVRV |
| | | ID | G (SEQ ID | GQFKSYYYMD | (SEQ ID | NO: 1089) | (SEQ ID |
| | | NO: 313) | NO: 507) | P (SEQ ID | NO: 895) | | NO: 1283) |
| | | | | NO: 701) | | | |
| 34 | AIP- | GFTFSKAW | RIKSVTDGE | TSSFCCRSGS | SGSSSNIG | KNNQRPS | STWDDSL |
| | 126175 | MS (SEQ | TTDYAAPVK | CPSSDTSYCN | SSSVS | (SEQ ID | SVRV |
| | | ID | G (SEQ ID | GQYKSYYYVN | (SEQ ID | NO: 1090) | (SEQ ID |
| | | NO: 314) | NO: 508) | I (SEQ ID | NO: 896) | | NO: 1284) |
| | | | | NO: 702) | | | |
| 34 | AIP- | GFTFSKAW | RIKSVTDGE | TTSFCCRGAS | SGSSSNIG | KNNQRPS | STWDDSL |
| | 180905 | MS (SEQ | TTDYAAPVK | CPSHDTSYCA | SSSVS | (SEQ ID | SVRV |
| | | ID | G (SEQ ID | GSYKSYYYVN | (SEQ ID | NO: 1091) | (SEQ ID |
| | | NO: 315) | NO: 509) | I (SEQ ID | NO: 897) | | NO: 1285) |
| | | | | NO: 703) | | | |
| 34 | AIP- | GFTFSKAW | RIKSVTDGE | TSAFCCRGKS | SGSSSNIG | KNNQRPS | STWDDSL |
| | 141706 | MS (SEQ | TTDYAAPVK | CPSSDTSYCG | SSSVS | (SEQ ID | SVRV |
| | | ID | G (SEQ ID | GQYPSYYYVN | (SEQ ID | NO: 1092) | (SEQ ID |
| | | NO: 316) | NO: 510) | I (SEQ ID | NO: 898) | | NO: 1286) |
| | | | | NO: 704) | | | |
| 34 | AIP- | GFTFSKAW | RIKSVTDGE | TSAFCCRGKS | SGSSSNIG | KNNQRPS | STWDDSL |
| | 105092 | MS (SEQ | TTDYAAPVK | CPSHDTSFCG | SSSVS | (SEQ ID | SVRV |
| | | ID | G (SEQ ID | GQDKRYYYVN | (SEQ ID | NO: 1093) | (SEQ ID |
| | | NO: 317) | NO: 511) | I (SEQ ID | NO: 899) | | NO: 1287) |
| | | | | NO: 705) | | | |
| 34 | AIP- | GFTFSKAW | RIKSVTDGE | TSAFCCRGGN | SGSSSNIG | KNNQRPS | STWDDSL |
| | 152031 | MS (SEQ | TTDYAAPVK | CPSHETSYCN | SSSVS | (SEQ ID | SVRV |
| | | ID | G (SEQ ID | GQNKQYYYMD | (SEQ ID | NO: 1094) | (SEQ ID |
| | | NO: 318) | NO: 512) | V (SEQ ID | NO: 900) | | NO: 1288) |
| | | | | NO: 706) | | | |
| 34 | AIP- | GFTFSKAW | RIKSVTDGE | TSSFCCRGNQ | SGSSSNIG | KNNQRPS | STWDDSL |
| | 163319 | MS (SEQ | TTDYAAPVK | CPSSDTSFCG | SSSVS | (SEQ ID | SVRV |
| | | ID | G (SEQ ID | GQDKRYYYMD | (SEQ ID | NO: 1095) | (SEQ ID |
| | | NO: 319) | NO: 513) | P (SEQ ID | NO: 901) | | NO: 1289) |
| | | | | NO: 707) | | | |
| 34 | AIP- | GFTFSKAW | RIKSVTDGE | TTSFCCRGNQ | SGSSSNIG | KNNQRPS | STWDDSL |
| | 160621 | MS (SEQ | TTDYAAPVK | CPSHETSYCG | SSSVS | (SEQ ID | SVRV |
| | | ID | G (SEQ ID | GYYKSYFYMD | (SEQ ID | NO: 1096) | (SEQ ID |
| | | NO: 320) | NO: 514) | V (SEQ ID | NO: 902) | | NO: 1290) |
| | | | | NO: 708) | | | |
| 34 | AIP- | GFTFSKAW | RIKSVTDGE | TSSYCCRGKQ | SGSSSNIG | KNNQRPS | STWDDSL |
| | 145212 | MS (SEQ | TTDYAAPVK | CPSHDTSYCA | SSSVS | (SEQ ID | SVRV |
| | | ID | G (SEQ ID | GQYADYYYMD | (SEQ ID | NO: 1097) | (SEQ ID |
| | | NO: 321) | NO: 515) | V (SEQ ID | NO: 903) | | NO: 1291) |
| | | | | NO: 709) | | | |
| 34 | AIP- | GFTFSKAW | RIKSVTDGE | ISSFCCRGKQ | SGSSSNIG | KNNQRPS | STWDDSL |
| | 112328 | MS (SEQ | TTDYAAPVK | CPSSDTSYCN | SSSVS | (SEQ ID | SVRV |
| | | ID | G (SEQ ID | GQYADYYYMD | (SEQ ID | NO: 1098) | (SEQ ID |
| | | NO: 322) | NO: 516) | V (SEQ ID | NO: 904) | | NO: 1292) |
| | | | | NO: 710) | | | |
| 35 | AIP- | GFTFSKAW | RIKSVTDGE | TSSFCCRGKQ | SGSSSNIG | KNNQRPS | STWDDSL |
| | 193106 | MS (SEQ | TTDYAAPVK | CPSSDTSYCN | SSSVS | (SEQ ID | SVRV |
| | | ID | G (SEQ ID | GQYADYYYVN | (SEQ ID | NO: 1099) | (SEQ ID |
| | | NO: 323) | NO: 517) | I (SEQ ID | NO: 905) | | NO: 1293) |
| | | | | NO: 711) | | | |
| 35 | AIP- | GFTFSKAW | RIKSVTDGE | ISSFCCRGKQ | SGSSSNIG | KNNQRPS | STWDDSL |
| | 125062 | MS (SEQ | TTDYAAPVK | CPSSDTSFCG | SSSVS | (SEQ ID | SVRV |
| | | ID | G (SEQ ID | GQDKRYYFMD | (SEQ ID | NO: 1100) | (SEQ ID |
| | | NO: 324) | NO: 518) | V (SEQ ID | NO: 906) | | NO: 1294) |
| | | | | NO: 712) | | | |
| 35 | AIP- | GFTFSKAW | RIKSVTDGE | TSAFCCRGKQ | SGSSSNIG | KNNQRPS | STWDDSL |
| | 124301 | MS (SEQ | TTDYAAPVK | CPSSDTSYCG | SSSVS | (SEQ ID | SVRV |
| | | ID | G (SEQ ID | GQYASFYYMD | (SEQ ID | NO: 1101) | (SEQ ID |
| | | NO: 325) | NO: 519) | V (SEQ ID | NO: 907) | | NO: 1295) |
| | | | | NO: 713) | | | |
| 35 | AIP- | GFTFSKAW | RIKSVTDGE | TSSFCCQGNN | SGSSSNIG | KNNQRPS | STWDDSL |
| | 124068 | MS (SEQ | TTDYAAPVK | CPSSDTSYCG | SSSVS | (SEQ ID | SVRV |
| | | ID | G (SEQ ID | GYYKDYYYMD | (SEQ ID | NO: 1102) | (SEQ ID |
| | | NO: 326) | NO: 520) | V (SEQ ID | NO: 908) | | NO: 1296) |
| | | | | NO: 714) | | | |
| 35 | AIP- | GFTFSKAW | RIKSVTDGE | TSSFCCQGNN | SGSSSNIG | KNNQRPS | STWDDSL |
| | 144568 | MS (SEQ | TTDYAAPVK | CPSHDTSYCG | SSSVS | (SEQ ID | SVRV |
| | | ID | G (SEQ ID | GQYKSYYYVN | (SEQ ID | NO: 1103) | (SEQ ID |
| | | NO: 327) | NO: 521) | I (SEQ ID | NO: 909) | | NO: 1297) |
| | | | | NO: 715) | | | |
| 35 | AIP- | GFTFSKAW | RIKSVTDGE | TSSFCCQGKN | SGSSSNIG | KNNQRPS | STWDDSL |
| | 139782 | MS (SEQ | TTDYAAPVK | CPSHETSYCG | SSSVS | (SEQ ID | SVRV |
| | | ID | G (SEQ ID | GQYADYYYMD | (SEQ ID | NO: 1104) | (SEQ ID |
| | | NO: 328) | NO: 522) | V (SEQ ID | NO: 910) | | NO: 1298) |
| | | | | NO: 716) | | | |
| 35 | AIP- | GFTFSKAW | RIKSVTDGE | TTSFCCHGNS | SGSSSNIG | KNNQRPS | STWDDSL |
| | 171543 | MS (SEQ | TTDYAAPVK | CPSSDTSYCG | SSSVS | (SEQ ID | SVRV |
| | | ID | G (SEQ ID | GQNKQYYYMD | (SEQ ID | NO: 1105) | (SEQ ID |
| | | NO: 329) | NO: 523) | V (SEQ ID | NO: 911) | | NO: 1299) |
| | | | | NO: 717) | | | |
| 35 | AIP- | GFTFSKAW | RIKSVTDGE | ISSFCCHGNS | SGSSSNIG | KNNQRPS | STWDDSL |
| | 140148 | MS (SEQ | TTDYAAPVK | CPSHDTSYCN | SSSVS | (SEQ ID | SVRV |
| | | ID | G (SEQ ID | GQNKQYYYMD | (SEQ ID | NO: 1106) | (SEQ ID |
| | | NO: 330) | NO: 524) | V (SEQ ID | NO: 912) | | NO: 1300) |
| | | | | NO: 718) | | | |
| 35 | AIP- | GFTFSKAW | RIKSVTDGE | ISSFCCHSNN | SGSSSNIG | KNNQRPS | STWDDSL |
| | 177193 | MS (SEQ | TTDYAAPVK | CPSSDTSYCN | SSSVS | (SEQ ID | SVRV |
| | | ID | G (SEQ ID | GQYKQYYYMD | (SEQ ID | NO: 1107) | (SEQ ID |
| | | NO: 331) | NO: 525) | V (SEQ ID | NO: 913) | | NO: 1301) |
| | | | | NO: 719) | | | |
| 35 | AIP- | GFTFSKAW | RIKSVTDGE | TSSFCCHSNN | SGSSSNIG | KNNQRPS | STWDDSL |
| | 171348 | MS (SEQ | TTDYAAPVK | CPSHDTSYCG | SSSVS | (SEQ ID | SVRV |
| | | ID | G (SEQ ID | GQYKSYYYVN | (SEQ ID | NO: 1108) | (SEQ ID |
| | | NO: 332) | NO: 526) | I (SEQ ID | NO: 914) | | NO: 1302) |
| | | | | NO: 720) | | | |
| 36 | AIP- | GFTFSKAW | RIKSVTDGE | ISSFACHSNN | SGSSSNIG | KNNQRPS | STWDDSL |
| | 193088 | MS (SEQ | TTDYAAPVK | CPSSDTSYVN | SSSVS | (SEQ ID | SVRV |
| | | ID | G (SEQ ID | GYYKQYYFMD | (SEQ ID | NO: 1109) | (SEQ ID |
| | | NO: 333) | NO: 527) | V (SEQ ID | NO: 915) | | NO: 1303) |
| | | | | NO: 721) | | | |
| 36 | AIP- | GFTFSKAW | RIKSVTDGE | TSSFCCHSNN | SGSSSNIG | KNNQRPS | STWDDSL |
| | 182087 | MS (SEQ | TTDYAAPVK | CPSSDTSYCN | SSSVS | (SEQ ID | SVRV |
| | | ID | G (SEQ ID | GQYKQYYYVN | (SEQ ID | NO: 1110) | (SEQ ID |
| | | NO: 334) | NO: 528) | I (SEQ ID | NO: 916) | | NO: 1304) |
| | | | | NO: 722) | | | |
| 36 | AIP- | GFTFSKAW | RIKSVTDGE | TSSFCCLGKA | SGSSSNIG | KNNQRPS | STWDDSL |
| | 151388 | MS (SEQ | TTDYAAPVK | CLSHDTSYCG | SSSVS | (SEQ ID | SVRV |
| | | ID | G (SEQ ID | GQYASYYYVN | (SEQ ID | NO: 1111) | (SEQ ID |
| | | NO: 335) | NO: 529) | I (SEQ ID | NO: 917) | | NO: 1305) |
| | | | | NO: 723) | | | |
| 36 | AIP- | GFTFSKAW | RIKSVTDGE | TSSFCCLGKA | SGSSSNIG | KNNQRPS | STWDDSL |
| | 149787 | MS (SEQ | TTDYAAPVK | CLSSDTSYCG | SSSVS | (SEQ ID | SVRV |
| | | ID | G (SEQ ID | GYYASYYFVN | (SEQ ID | NO: 1112) | (SEQ ID |
| | | NO: 336) | NO: 530) | I (SEQ ID | NO: 918) | | NO: 1306) |
| | | | | NO: 724) | | | |
| 36 | AIP- | GFTFSKAW | RIKSVTDGE | TSSFACLGKA | SGSSSNIG | KNNQRPS | STWDDSL |
| | 126097 | MS (SEQ | TTDYAAPVK | CLSSDTSYVG | SSSVS | (SEQ ID | SVRV |
| | | ID | G (SEQ ID | GYYASYYFVN | (SEQ ID | NO: 1113) | (SEQ ID |
| | | NO: 337) | NO: 531) | I (SEQ ID | NO: 919) | | NO: 1307) |
| | | | | NO: 725) | | | |
| 36 | AIP- | GFTFSKAW | RIKSVTDGE | TSSYCCLGNS | SGSSSNIG | KNNQRPS | STWDDSL |
| | 107759 | MS (SEQ | TTDYAAPVK | CPSSDTSYCG | SSSVS | (SEQ ID | SVRV |
| | | ID | G (SEQ ID | GQFKSYYYMD | (SEQ ID | NO: 1114) | (SEQ ID |
| | | NO: 338) | NO: 532) | P (SEQ ID | NO: 920) | | NO: 1308) |
| | | | | NO: 726) | | | |
| 36 | AIP- | GFTFSKAW | RIKSVTDGE | TSSYCCLGNS | SGSSSNIG | KNNQRPS | STWDDSL |
| | 148484 | MS (SEQ | TTDYAAPVK | CPSSDTSFCG | SSSVS | (SEQ ID | SVRV |
| | | ID | G (SEQ ID | GQDKRYYYMD | (SEQ ID | NO: 1115) | (SEQ ID |
| | | NO: 339) | NO: 533) | P (SEQ ID | NO: 921) | | NO: 1309) |
| | | | | NO: 727) | | | |
| 36 | AIP- | GFTFSKAW | RIKSVTDGE | ISSFCCLGGN | SGSSSNIG | KNNQRPS | STWDDSL |
| | 186403 | MS (SEQ | TTDYAAPVK | CPSSETSYCG | SSSVS | (SEQ ID | SVRV |
| | | ID | G (SEQ ID | NQYPSYYYMD | (SEQ ID | NO: 1116) | (SEQ ID |
| | | NO: 340) | NO: 534) | V (SEQ ID | NO: 922) | | NO: 1310) |
| | | | | NO: 728) | | | |
| 36 | AIP- | GFTFSKAW | RIKSVTDGE | ISSFCCLGGN | SGSSSNIG | KNNQRPS | STWDDSL |
| | 166629 | MS (SEQ | TTDYAAPVK | CPSSETSYCG | SSSVS | (SEQ ID | SVRV |
| | | ID | G (SEQ ID | NYYPSYFYMD | (SEQ ID | NO: 1117) | (SEQ ID |
| | | NO: 341) | NO: 535) | V (SEQ ID | NO: 923) | | NO: 1311) |
| | | | | NO: 729) | | | |
| 36 | AIP- | GFTFSKAW | RIKSVTDGE | TSSFCCLGGN | SGSSSNIG | KNNQRPS | STWDDSL |
| | 165276 | MS (SEQ | TTDYAAPVK | CPSSETSYCG | SSSVS | (SEQ ID | SVRV |
| | | ID | G (SEQ ID | NQYPSYYYVN | (SEQ ID | NO: 1118) | (SEQ ID |
| | | NO: 342) | NO: 536) | I (SEQ ID | NO: 924) | | NO: 1312) |
| | | | | NO: 730) | | | |
| 37 | AIP- | GFTFSKAW | RIKSVTDGE | TTSFACRGNQ | SGSSSNIG | KNNQRPS | STWDDSL |
| | 188293 | MS (SEQ | TTDYAAPVK | CPSHETSYVG | SSSVS | (SEQ ID | SVRV |
| | | ID | G (SEQ ID | GYYKSYFYMD | (SEQ ID | NO: 1119) | (SEQ ID |
| | | NO: 343) | NO: 537) | V (SEQ ID | NO: 925) | | NO: 1313) |
| | | | | NO: 731) | | | |
| 37 | AIP- | GFTFSKAW | RIKSVTDGE | TTSFACRGNQ | SGSSSNIG | KNNQRPS | STWDDSL |
| | 109364 | MS (SEQ | TTDYAAPVK | CPSSETSYVG | SSSVS | (SEQ ID | SVRV |
| | | ID | G (SEQ ID | GYYKSYFFMD | (SEQ ID | NO: 1120) | (SEQ ID |
| | | NO: 344) | NO: 538) | V (SEQ ID | NO: 926) | | NO: 1314) |
| | | | | NO: 732) | | | |
| 37 | AIP- | GFTFSKAW | RIKSVTDGE | ISSFACRGKQ | SGSSSNIG | KNNQRPS | STWDDSL |
| | 191805 | MS (SEQ | TTDYAAPVK | CPSSDTSYVG | SSSVS | (SEQ ID | SVRV |
| | | ID | G (SEQ ID | GQFKSYYFMD | (SEQ ID | NO: 1121) | (SEQ ID |
| | | NO: 345) | NO: 539) | V (SEQ ID | NO: 927) | | NO: 1315) |
| | | | | NO: 733) | | | |
| 37 | AIP- | GFTFAKAW | RIKAADDGK | TSSFCCRGGS | SGSSTNIG | KNNYRPS | STWDDSL |
| | 181592 | MS (SEQ | QTDYAAPVK | CLSHDTSYCG | SSSVY | (SEQ ID | SVRV |
| | | ID | G (SEQ ID | GQYKSYYWMD | (SEQ ID | NO: 1122) | (SEQ ID |
| | | NO: 346) | NO: 540) | V (SEQ ID | NO: 928) | | NO: 1316) |
| | | | | NO: 734) | | | |
| 37 | AIP- | GFTYAKAW | RIKSVQDGE | TSSYCCLGGS | SGSSTNIG | KNNYRAS | STWDDSL |
| | 155587 | MS (SEQ | QTDYAAPVK | CPSHDTSYCG | SSSVY | (SEQ ID | SVRV |
| | | ID | G (SEQ ID | GSYKSYYYMD | (SEQ ID | NO: 1123) | (SEQ ID |
| | | NO: 347) | NO: 541) | V (SEQ ID | NO: 929) | | NO: 1317) |
| | | | | NO: 735) | | | |
| 37 | AIP- | GFDASKAW | RIKSVTDGE | TSSFCCRGGS | TGSSSNIG | KNSLRPQ | STWDDSL |
| | 147945 | FT (SEQ | TTDYAAPVK | CPSHDTSYCG | SSYVS | (SEQ ID | SVRV |
| | | ID | G (SEQ ID | GQNKQYYYMD | (SEQ ID | NO: 1124) | (SEQ ID |
| | | NO: 348) | NO: 542) | V (SEQ ID | NO: 930) | | NO: 1318) |
| | | | | NO: 736) | | | |
| 37 | AIP- | GFDASKAW | RIKSVTDGE | TSSFACRGGS | TGSSSNIG | KNSLRPQ | STWDDSL |
| | 199264 | FT (SEQ | TTDYAAPVK | CPSHDTSYVG | SSYVS | (SEQ ID | SVRV |
| | | ID | G (SEQ ID | GQYKSYYYMD | (SEQ ID | NO: 1125) | (SEQ ID |
| | | NO: 349) | NO: 543) | V (SEQ ID | NO: 931) | | NO: 1319) |
| | | | | NO: 737) | | | |
| 37 | AIP- | GFDASKAW | RIKSVTDGE | TSSYCCLGGS | TGSSSNIG | KNSLRPQ | STWDDSL |
| | 123438 | FT (SEQ | TTDYAAPVK | CPSHDTSYCG | SSYVS | (SEQ ID | SVRV |
| | | ID | G (SEQ ID | GSYKSYYYMD | (SEQ ID | NO: 1126) | (SEQ ID |
| | | NO: 350) | NO: 544) | V (SEQ ID | NO: 932) | | NO: 1320) |
| | | | | NO: 738) | | | |
| 37 | AIP- | GFDASKAW | RIKSVTDGE | TSSFCCRGKS | TGSSSNIG | KNSLRPQ | STWDDSL |
| | 151315 | FT (SEQ | TTDYAAPVK | CPSHDTSYCG | SSYVS | (SEQ ID | SVRV |
| | | ID | G (SEQ ID | GQYASYYYMD | (SEQ ID | NO: 1127) | (SEQ ID |
| | | NO: 351) | NO: 545) | V (SEQ ID | NO: 933) | | NO: 1321) |
| | | | | NO: 739) | | | |
| 37 | AIP- | GFTFSKAW | RIKAADDGK | TSSFCCRGGN | SGSPSNIG | KNNQRPS | STWDDSL |
| | 197785 | MS (SEQ | QTDYAAPVK | CPSHETSYCG | SASTS | (SEQ ID | SVRV |
| | | ID | G (SEQ ID | NQYKSYYYMD | (SEQ ID | NO: 1128) | (SEQ ID |
| | | NO: 352) | NO: 546) | V (SEQ ID | NO: 934) | | NO: 1322) |
| | | | | NO: 740) | | | |
| 38 | AIP- | GFTFSKAW | RIKAADDGK | TSSFCCRSGS | SGSPSNIG | KNNQRPS | STWDDSL |
| | 115782 | MS (SEQ | QTDYAAPVK | CPSSDTSYCN | SASTS | (SEQ ID | SVRV |
| | | ID | G (SEQ ID | GQYKSYYYMD | (SEQ ID | NO: 1129) | (SEQ ID |
| | | NO: 353) | NO: 547) | V (SEQ ID | NO: 935) | | NO: 1323) |
| | | | | NO: 741) | | | |
| 38 | AIP- | GFTFSKAW | RIKAADDGK | TSSFCCRGGS | SGSPSNIG | KNNQRPS | STWDDSL |
| | 138130 | MS (SEQ | QTDYAAPVK | CPSHDTSYCG | SASTS | (SEQ ID | SVRV |
| | | ID | G (SEQ ID | GQYKSYYYVN | (SEQ ID | NO: 1130) | (SEQ ID |
| | | NO: 354) | NO: 548) | I (SEQ ID | NO: 936) | | NO: 1324) |
| | | | | NO: 742) | | | |
| 38 | AIP- | GFTFSKAW | RIKAADDGK | TTSFCCRGAS | SGSPSNIG | KNNQRPS | STWDDSL |
| | 170221 | MS (SEQ | QTDYAAPVK | CPSHDTSYCA | SASTS | (SEQ ID | SVRV |
| | | ID | G (SEQ ID | GSYKSYYYMD | (SEQ ID | NO: 1131) | (SEQ ID |
| | | NO: 355) | NO: 549) | V (SEQ ID | NO: 937) | | NO: 1325) |
| | | | | NO: 743) | | | |
| 38 | AIP- | GFTFSKAW | RIKAADDGK | ISSFCCRGNS | SGSPSNIG | KNNQRPS | STWDDSL |
| | 167482 | MS (SEQ | QTDYAAPVK | CPSSDTSYCN | SASTS | (SEQ ID | SVRV |
| | | ID | G (SEQ ID | GQYKSYYYMD | (SEQ ID | NO: 1132) | (SEQ ID |
| | | NO: 356) | NO: 550) | V (SEQ ID | NO: 938) | | NO: 1326) |
| | | | | NO: 744) | | | |
| 38 | AIP- | GFTFSKAW | RIKAVTDGH | TSSFCCRGGS | SGASSNIG | RNNQQPL | STWDDAL |
| | 189475 | MS (SEQ | TTDYAAPVK | CPSHDTSYCG | HSSVY | (SEQ ID | SIRV |
| | | ID | G (SEQ ID | GQYKSYYYMD | (SEQ ID | NO: 1133) | (SEQ ID |
| | | NO: 357) | NO: 551) | V (SEQ ID | NO: 939) | | NO: 1327) |
| | | | | NO: 745) | | | |
| 38 | AIP- | GFVYSKAW | RIKSVTDGQ | TSSFCCRGGS | SGSSSNIG | KNTQRAS | STWDDAL |
| | 102833 | MS (SEQ | ATDYAAPVK | CPSHDTSYCG | SSSVS | (SEQ ID | NVRV |
| | | ID | G (SEQ ID | GQYKSYYYMD | (SEQ ID | NO: 1134) | (SEQ ID |
| | | NO: 358) | NO: 552) | V (SEQ ID | NO: 940) | | NO: 1328) |
| | | | | NO: 746) | | | |
| 38 | AIP- | GFVFSKAW | RIKSVTDGE | TSSFCCRGKS | SGSSSNIG | RNNQQPL | SSWDDSS |
| | 173396 | MS (SEQ | TTDYAAPVK | CPSHDTSYCG | SSSVS | (SEQ ID | LVRV |
| | | ID | G (SEQ ID | GQYASYYYMD | (SEQ ID | NO: 1135) | (SEQ ID |
| | | NO: 359) | NO: 553) | V (SEQ ID | NO: 941) | | NO: 1329) |
| | | | | NO: 747) | | | |
| 38 | AIP- | GFTFAKAW | RIKSVTDAE | TSSFCCRSGS | SGSSSNIG | KNNARPS | ATWDNSL |
| | 132355 | MS (SEQ | TTDYAAPVK | CPSSDTSYCN | SSSVT | (SEQ ID | SIRV |
| | | ID | G (SEQ ID | GQYKSYYWMD | (SEQ ID | NO: 1136) | (SEQ ID |
| | | NO: 360) | NO: 554) | V (SEQ ID | NO: 942) | | NO: 1330) |
| | | | | NO: 748) | | | |
| 38 | AIP- | GFTYAKAW | RIKSTSDGG | TSSFCCRGGS | SGSKSNIG | KDNQRAS | STWDDAL |
| | 118505 | FT (SEQ | ITDYAAPVK | CPSHDTSFCG | SSYVS | (SEQ ID | SVRV |
| | | ID | G (SEQ ID | GQYKSYYYMD | (SEQ ID | NO: 1137) | (SEQ ID |
| | | NO: 361) | NO: 555) | V (SEQ ID | NO: 943) | | NO: 1331) |
| | | | | NO: 749) | | | |
| 38 | AIP- | GFTFSKAW | RIKSVSDGE | TSSFCCRGGS | SGSSSNIG | KNNQRPS | STWDDSL |
| | 131972 | MS (SEQ | TTDYAAPVK | CPSRDTSYCG | SSSVY | (SEQ ID | SVRV |
| | | ID | G (SEQ ID | GQYKSYYFMD | (SEQ ID | NO: 1138) | (SEQ ID |
| | | NO: 362) | NO: 556) | V (SEQ ID | NO: 944) | | NO: 1332) |
| | | | | NO: 750) | | | |
| 39 | AIP- | GFTFSKAW | RIKSTSDGG | TTSFCCRGGR | SGSSSNIG | KNNQRPS | STWDDSL |
| | 189526 | MT | ITDYAAPVK | CPSRDTSFCG | SSSVS | (SEQ ID | SVRV |
| | | (SEQ ID | G (SEQ | GQYNSYYYMD | (SEQ ID | NO: 1138) | (SEQ ID |
| | | NO: 171) | NO: 555) | V (SEQ ID | NO: 48) | | NO: 1332) |
| | | | | NO: 1727) | | | |

What is claimed is:

1. A method of treating a cancer patient having a tumor that comprises an extracellular RNA-protein complex, the method comprising administering to the patient an antibody that binds to tissue from the tumor, wherein the antibody comprises:
a heavy chain variable region comprising:
an HCDR1 comprising a sequence GFTFSKAWMS (SEQ ID NO:1), or a variant HCDR1 in which 1 amino acid is substituted relative to the sequence;
an HCDR2 comprising a sequence RIKSVTDGETTDYAAPVKG (SEQ ID NO:9), or a variant HCDR2 in which 1 amino acid is substituted relative to the sequence; and
an HCDR3 comprising a sequence TSSFCCRGGSCPSHDTSYCGGQYKSYYYMDV (SEQ ID NO:21), or a variant HCDR3 in which 1, 2, or 3 amino acids are substituted relative to the sequence;
a light chain variable region comprising:
an LCDR1 comprising a sequence SGSSSNIGSSSVS (SEQ ID NO:48), or a variant LCDR1 in which 1 amino acid is substituted relative to the sequence;
an LCDR2 comprising a sequence KNNQRPS (SEQ ID NO:59), or variant LCDR2 in which 1 amino acid is substituted relative to the sequence; and
an LCDR3 comprising a sequence STWDDSLSVRV (SEQ ID NO:68), or a variant LCDR3 in which 1 amino acid is substituted relative to the sequence.

2. The method of claim 1, wherein the antibody comprises an HCDR1 comprising a sequence GFTFSKAWMS (SEQ ID NO:1), an HCDR2 comprising a sequence RIKSVTDGETTDYAAPVKG (SEQ ID NO:9), an HCDR3 comprising a sequence TSSFCCRGGSCPSHDTSYCGGQYKSYYYMDV (SEQ ID NO:21), an LCDR1 comprising a sequence SGSSSNIGSSSVS (SEQ ID NO:48), an LCDR2 comprising a sequence KNNQRPS (SEQ ID NO:59), and an LCDR3 comprising a sequence STWDDSLSVRV (SEQ ID NO:68).

3. The method of claim 2, wherein the V_{H} comprises an amino acid sequence having at least 95% identity to EVQLVESGGALVKPGGSLRLSCAASGFTFSKAWMSWVRQAPGKGLEWVGRIKSVTDG ETTDYAAPVKGRFTISRDDSKSTLYLQMNSLKTEDTAVYYCTSSFCCRGGSCPSHDTSY CGGQYKSYYYMDVWGKGTTVTVSS (SEQ ID NO:94); and the V_{L} comprises an amino sequence having at least 95% identity to
(SEQ ID NO: 140)
QSVLTQPPSASGTPGQRVTISCSGSSSNIGSSSVSWYQQLPGTAPKLLIY
KNNQRPSGVPDRFSGSKSGTSASLAISGLRSEDEADYYCSTWDDSLSVRV
FGGGTKLTVL.

4. The method of claim 3, wherein the V_{H} comprises a sequence
(SEQ ID NO: 94)
EVQLVESGGALVKPGGSLRLSCAASGFTFSKAWMSWVRQAPGKGLEWVGR
IKSVTDGETTDYAAPVKGRFTISRDDSKSTLYLQMNSLKTEDTAVYYCTS
SFCCRGGSCPSHDTSYCGGQYKSYYYMDVWGKGTTVTVSS;
and the V_{L} comprises a sequence
(SEQ ID NO: 140)
QSVLTQPPSASGTPGQRVTISCSGSSSNIGSSSVSWYQQLPGTAPKLLIY
KNNQRPSGVPDRFSGSKSGTSASLAISGLRSEDEADYYCSTWDDSLSVRV
FGGGTKLTVL.

5. The method of claim 1, wherein the antibody comprises a heavy chain constant region sequence of SEQ ID NO:1721 and a light chain constant region sequence of SEQ ID NO:1722.

6. The method of claim 5, wherein the heavy chain comprises a sequence of SEQ ID NO:1723 and the light chain comprises a sequence of SEQ ID NO:1724.

7. A method of treating a cancer patient having a tumor that comprises an extracellular RNA-protein complex, the method comprising administering to the patient an antibody that binds to tissue from the tumor, wherein the antibody comprises six CDRs comprising HCDR1, HCDR2, HCDR3, LCDR1, LCDR2, LCDR3 sequences, respectively, as follows:
AIP-192482 SEQ ID NOS: 8, 9, 34, 48, 59, 68;
AIP-171142 SEQ ID NOS: 8, 9, 35, 48, 59, 68;
AIP-165430 SEQ ID NOS: 8, 9, 37, 48, 59, 68;
AIP-189526 SEQ ID NOS: 8, 16, 38, 48, 59, 68;
AIP-122563 SEQ ID NOS: 8, 9, 34, 48, 59, 68;
AIP-158623 SEQ ID NOS: 8, 9, 37, 48, 59, 68;
AIP-155066 SEQ ID NOS: 8, 9, 39, 48, 59, 68;
AIP-166120 SEQ ID NOS: 8, 9, 21, 48, 59, 68;
AIP-133645 SEQ ID NOS: 8, 9, 37, 48, 59, 73;
AIP-187893 SEQ ID NOS: 1, 9, 37, 48, 59, 68;
AIP-142079 SEQ ID NOS: 8, 9, 41, 48, 59, 68;
AIP-102396 SEQ ID NOS: 172, 366, 560, 754, 948, 1142;
AIP-150055 SEQ ID NOS: 173, 367, 561, 755, 949, 1143;
AIP-167084 SEQ ID NOS: 174, 368, 562, 756, 950, 1144;
AIP-185304 SEQ ID NOS: 175, 369, 563, 757, 951, 1145;
AIP-134770 SEQ ID NOS: 176, 370, 564, 758, 952, 1146;
AIP-141887 SEQ ID NOS: 177, 371, 565, 759, 953, 1147;
AIP-196203 SEQ ID NOS: 178, 372, 566, 760, 954, 1148;
AIP-128195 SEQ ID NOS: 180, 374, 568, 762, 956, 1150;
AIP-116579 SEQ ID NOS: 181, 375, 569, 763, 957, 1151;
AIP-192329 SEQ ID NOS: 182, 376, 570, 764, 958, 1152
AIP-197809 SEQ ID NOS: 184, 378, 572, 766, 960, 1154;
AIP-142489 SEQ ID NOS: 185, 379, 573, 767, 961, 1155;
AIP-167726 SEQ ID NOS: 187, 381, 575, 769, 963, 1157;
AIP-199834 SEQ ID NOS: 188, 382, 576, 770, 964, 1158;
AIP-143179 SEQ ID NOS: 189, 383, 577, 771, 965, 1159;
AIP-195587 SEQ ID NOS: 190, 384, 578, 772, 966, 1160;
AIP-153462 SEQ ID NOS: 191, 385, 579, 773, 967, 1161;
AIP-115363 SEQ ID NOS: 192, 386, 580, 774, 968, 1162;
AIP-151090 SEQ ID NOS: 193, 387, 581, 775, 969, 1163;
AIP-168083 SEQ ID NOS: 194, 388, 582, 776, 970, 1164;
AIP-161082 SEQ ID NOS: 195, 389, 583, 777, 971, 1165;
AIP-114196 SEQ ID NOS: 196, 390, 584, 778, 972, 1166;
AIP-189338 SEQ ID NOS: 197, 391, 585, 779, 973, 1167
AIP-183190 SEQ ID NOS: 198, 392, 586, 780, 974, 1168;
AIP-110143 SEQ ID NOS: 199, 393, 587, 781, 975, 1169;
AIP-147176 SEQ ID NOS: 200, 394, 588, 782, 976, 1170;
AIP-134312 SEQ ID NOS: 201, 395, 589, 783, 977, 1171;
AIP-128243 SEQ ID NOS: 202, 396, 590, 784, 978, 1172;
AIP-156172 SEQ ID NOS: 203, 397, 591, 785, 979, 1173;
AIP-147389 SEQ ID NOS: 204, 398, 592, 786, 980, 1174;
AIP-124314 SEQ ID NOS: 205, 399, 593, 787, 981, 1175;
AIP-185291 SEQ ID NOS: 206, 400, 594, 788, 982, 1176;
AIP-135247 SEQ ID NOS: 207, 401, 595, 789, 983, 1177;
AIP-113513 SEQ ID NOS: 208, 402, 596, 790, 984, 1178;
AIP-102299 SEQ ID NOS: 209, 403, 597, 791, 985, 1179;
AIP-179097 SEQ ID NOS: 210, 404, 598, 792, 986, 1180
AIP-109343 SEQ ID NOS: 211, 405, 599, 793, 987, 1181;
AIP-119622 SEQ ID NOS: 212, 406, 600, 794, 988, 1182;
AIP-191735 SEQ ID NOS: 213, 407, 601, 795, 989, 1183;
AIP-157078 SEQ ID NOS: 214. 408, 602, 796, 990, 1184;
AIP-153475 SEQ ID NOS: 215, 409, 603, 797, 991, 1185;
AIP-133650 SEQ ID NOS: 216, 410, 604, 798, 992, 1186;
AIP-190915 SEQ ID NOS: 217, 411, 605, 799, 993, 1187;
AIP-167400 SEQ ID NOS: 219, 413, 607, 801, 995, 1189;
AIP-109729 SEQ ID NOS: 220, 414, 608, 802, 996, 1190;
AIP-151709 SEQ ID NOS: 221, 415, 609, 803, 997, 1191;
AIP-136628 SEQ ID NOS: 226, 420, 614, 808, 1002, 1196;
AIP-101601 SEQ ID NOS: 230, 424, 618, 812, 1006, 1200;
AIP-146871 SEQ ID NOS: 232, 426, 620, 814, 1008, 1202;
AIP-170053 SEQ ID NOS: 233, 427, 621, 815, 1009, 1203;
AIP-199483 SEQ ID NOS: 234, 428, 622, 816, 1010, 1204;
AIP-162041 SEQ ID NOS: 236, 430, 624, 818, 1012, 1206;
AIP-180675 SEQ ID NOS: 1, 9, 43, 48, 59, 68;
AIP-183133 SEQ ID NOS: 238, 432, 626, 820, 1014, 1208;
AIP-191470 SEQ ID NOS: 239, 433, 627, 821, 1015, 1209;
AIP-151167 SEQ ID NOS: 240, 434, 628, 822, 1016, 1210;
AIP-106633 SEQ ID NOS: 241, 435, 629, 823, 1017, 1211;
AIP-102624 SEQ ID NOS: 242, 436, 630, 824, 1018, 1212;
AIP-109484 SEQ ID NOS: 243, 437, 631, 825, 1019, 1213;
AIP-126080 SEQ ID NOS: 1, 9, 44, 48, 59, 68;
AIP-161571 SEQ ID NOS: 1, 9, 45, 48, 59, 68;
AIP-163039 SEQ ID NOS: 251, 445, 639, 833, 1027, 1221;
AIP-101235 SEQ ID NOS: 1, 9, 20, 48, 59, 68;
AIP-182061 SEQ ID NOS: 253, 447, 641, 835, 1029, 1223;
AIP-181246 SEQ ID NOS: 1, 9, 46, 48, 59, 68;
AIP-192216 SEQ ID NOS: 1, 9, 47, 48, 59, 68;
AIP-171912 SEQ ID NOS: 255, 449, 643, 837, 1031, 1225;
AIP-172872 SEQ ID NOS: 1, 18, 21, 48, 65, 75;
AIP-167833 SEQ ID NOS: 256, 450, 644, 838, 1032, 1226;
AIP-190051 SEQ ID NOS: 8, 9, 21, 58, 59, 72;
AIP-145518 SEQ ID NOS: 257, 451, 645, 839, 1033, 1227;
AIP-167533 SEQ ID NOS: 1, 19, 21, 48, 59, 68;
AIP-112580 SEQ ID NOS: 1, 9, 27, 48, 59, 68;
AIP-143155 SEQ ID NOS: 258, 452, 646, 840, 1034, 1228;
AIP-119664 SEQ ID NOS: 259, 453, 647, 841, 1035, 1229;
AIP-190526 SEQ ID NOS: 260, 454, 648, 842, 1036, 1230;
AIP-114403 SEQ ID NOS: 261, 455, 649, 843, 1037, 1231;
AIP-156760 SEQ ID NOS: 262, 456, 650, 844, 1038, 1232;
AIP-103803 SEQ ID NOS: 263, 457, 651, 845, 1039, 1233;
AIP-195588 SEQ ID NOS: 265, 459, 653, 847, 1041, 1235;
AIP-145722 SEQ ID NOS: 266, 460, 654, 848, 1042, 1236;
AIP-178251 SEQ ID NOS: 267, 461, 655, 849, 1043, 1237;
AIP-116142 SEQ ID NOS: 268, 462, 656, 850, 1044, 1238;
AIP-183350 SEQ ID NOS: 269, 463, 657, 851, 1045, 1239;
AIP-127108 SEQ ID NOS: 270, 464, 658, 852, 1046, 1240;
AIP-128147 SEQ ID NOS: 271, 465, 659, 853, 1047, 1241;
AIP-109510 SEQ ID NOS: 272, 466, 660, 854, 1048, 1241;
AIP-104086 SEQ ID NOS: 273, 467, 661, 855, 1049, 1243;
AIP-143132 SEQ ID NOS: 274, 468, 662, 856, 1050, 1244;
AIP-170105 SEQ ID NOS: 1, 9, 21, 56, 59, 68;
AIP-169636 SEQ ID NOS: 275; 469, 663, 857, 1051, 1245;
AIP-152243 SEQ ID NOS: 276, 470, 664, 858, 1052, 1246;
AIP-138776 SEQ ID NOS: 277, 471, 665, 859, 1053, 1247;
AIP-103817 SEQ ID NOS: 278, 472, 666, 860, 1054, 1248;
AIP-130491 SEQ ID NOS: 279, 473, 667, 861, 1055, 1249;
AIP-188155 SEQ ID NOS: 280, 474, 668, 862, 1056, 1250;
AIP-167246 SEQ ID NOS: 281, 475, 669, 863, 1057, 1251;
AIP-106139 SEQ ID NOS: 282, 476, 670, 864, 1058, 1252;
AIP-198351 SEQ ID NOS: 283, 477, 671, 865, 1059, 1253;
AIP-159326 SEQ ID NOS: 284, 478, 672, 866, 1060, 1254;
AIP-192275 SEQ ID NOS: 285, 479, 673, 867, 1061, 1255;
AIP-190761 SEQ ID NOS: 286, 480, 674, 868, 1062, 1256;
AIP-166832 SEQ ID NOS: 287, 481, 675, 869, 1063, 1257;
AIP-148062 SEQ ID NOS: 288, 482, 676, 870, 1064, 1258;
AIP-129145 SEQ ID NOS: 289, 483, 677, 871, 1065, 1259;
AIP-111240 SEQ ID NOS: 290, 484, 678, 872, 1066, 1260;
AIP-153888 SEQ ID NOS: 292, 486, 680, 874, 1068, 1262;
AIP-130915 SEQ ID NOS: 293, 487, 681, 875, 1069, 1263;
AIP-109048 SEQ ID NOS: 294, 488, 682, 876, 1070, 1264;
AIP-170569 SEQ ID NOS: 295, 489, 683, 877, 1071, 1265;
AIP-154873 SEQ ID NOS: 296, 490, 684, 878, 1072, 1266;
AIP-159037 SEQ ID NOS: 297, 491, 685, 879, 1073, 1267;
AIP-186826 SEQ ID NOS: 298, 492, 686, 880, 1074, 1268;
AIP-156514 SEQ ID NOS: 299, 493, 687, 881, 1075, 1269;
AIP-157122 SEQ ID NOS: 300, 494, 688, 882, 1076, 1270;
AIP-173276 SEQ ID NOS: 301, 495, 689, 883, 1077, 1271;
AIP-150485 SEQ ID NOS: 302, 496, 690, 884, 1078, 1272;
AIP-166847 SEQ ID NOS: 304, 498, 692, 886, 1080, 1274;
AIP-124013 SEQ ID NOS: 305, 499, 693, 887, 1081, 1275;
AIP-126285 SEQ ID NOS: 306, 500, 694, 888, 1082, 1276
AIP-168605 SEQ ID NOS: 1, 9, 21, 57, 59, 74;
AIP-190274 SEQ ID NOS: 307, 501, 695, 889, 1083, 1277;
AIP-136060 SEQ ID NOS: 1, 9, 21, 48, 67, 68;
AIP-180422 SEQ ID NOS: 310, 504, 698, 892, 1086, 1280;
AIP-166722 SEQ ID NOS: 311, 505, 699, 893, 1087, 1281;
AIP-127782 SEQ ID NOS: 1, 504, 21, 48, 59, 68;
AIP-189473 SEQ ID NOS: 1, 9, 22, 48, 59, 68;
AIP-192571 SEQ ID NOS: 1, 9, 23, 48, 59, 68;
AIP-112328 SEQ ID NOS: 322, 516, 710, 904, 1098, 1292;
AIP-125258 SEQ ID NOS: 1, 9, 24, 48, 59, 68;
AIP-150199 SEQ ID NOS: 1, 9, 25, 48, 59, 68;
AIP-125062 SEQ ID NOS: 324, 518, 712, 906, 1100, 1294;
AIP-177193 SEQ ID NOS: 331, 525, 719, 913, 1107, 1301;
AIP-115388 SEQ ID NOS: 1, 9, 26, 48, 59, 68;
AIP-107759 SEQ ID NOS: 338, 532, 726, 920, 1114, 1308;
AIP-170221 SEQ ID NOS: 355, 549, 743, 937, 1131, 1325;
AIP-143369 SEQ ID NOS: 2, 10, 21, 49, 60, 68;
AIP-189475 SEQ ID NOS: 357, 551, 745, 939, 1133, 1327;
AIP-102833 SEQ ID NOS: 358, 552, 746, 940, 1134, 1328;
AIP-157045 SEQ ID NOS: 3, 11, 21, 50, 61, 69;
AIP-175775 SEQ ID NOS: 4, 9, 27, 51, 62, 70;
AIP-154181 SEQ ID NOS: 5, 12, 28, 52, 63, 71;
AIP-125984 SEQ ID NOS: 6, 13, 21, 53, 64, 76;
AIP-160829 SEQ ID NOS: 7, 14, 29, 52, 65, 69;
AIP-184744 SEQ ID NOS: 4, 15, 30, 54, 62, 71;
AIP-128136 SEQ ID NOS: 1, 12, 31, 55, 66, 72;
AIP-181273 SEQ ID NOS: 1, 9, 32, 56, 59, 72;
AIP-153125 SEQ ID NOS: 1, 12, 33, 50, 66, 68; or
AIP-131972 SEQ ID NOS: 362, 556, 750, 944, 1138, 1332;
or a variant of said antibody in which one, two, three, four, five, or all six CDR sequences contain 1 or 2 amino acid substitutions.

8. The method of claim 7, wherein the antibody comprises HCDR1, HCDR2, HCDR3, LCDR1, LCDR2, and LCDR3 sequences:
AIP-192482 SEQ ID NOS: 8, 9, 34, 48, 59, 68;
AIP-171142 SEQ ID NOS: 8, 9, 35, 48, 59, 68;
AIP-165430 SEQ ID NOS: 8, 9, 37, 48, 59, 68;
AIP-189526 SEQ ID NOS: 8, 16, 38, 48, 59, 68;
AIP-122563 SEQ ID NOS: 8, 9, 34, 48, 59, 68;
AIP-158623 SEQ ID NOS: 8, 9, 37, 48, 59, 68;
AIP-155066 SEQ ID NOS: 8, 9, 39, 48, 59, 68;
AIP-166120 SEQ ID NOS: 8, 9, 21, 48, 59, 68;
AIP-133645 SEQ ID NOS: 8, 9, 37, 48, 59, 73;
AIP-187893 SEQ ID NOS: 1, 9, 37, 48, 59, 68;
AIP-142079 SEQ ID NOS: 8, 9, 41, 48, 59, 68;
AIP-102396 SEQ ID NOS: 172, 366, 560, 754, 948, 1142;
AIP-150055 SEQ ID NOS: 173, 367, 561, 755, 949, 1143;
AIP-167084 SEQ ID NOS: 174, 368, 562, 756, 950, 1144;
AIP-185304 SEQ ID NOS: 175, 369, 563, 757, 951, 1145;
AIP-134770 SEQ ID NOS: 176, 370, 564, 758, 952, 1146;
AIP-141887 SEQ ID NOS: 177, 371, 565, 759, 953, 1147;
AIP-196203 SEQ ID NOS: 178, 372, 566, 760, 954, 1148;
AIP-128195 SEQ ID NOS: 180, 374, 568, 762, 956, 1150;
AIP-116579 SEQ ID NOS: 181, 375, 569, 763, 957, 1151;
AIP-192329 SEQ ID NOS: 182, 376, 570, 764, 958, 1152
AIP-197809 SEQ ID NOS: 184, 378, 572, 766, 960, 1154;
AIP-142489 SEQ ID NOS: 185, 379, 573, 767, 961, 1155;
AIP-167726 SEQ ID NOS: 187, 381, 575, 769, 963, 1157;
AIP-199834 SEQ ID NOS: 188, 382, 576, 770, 964, 1158;
AIP-143179 SEQ ID NOS: 189, 383, 577, 771, 965, 1159;
AIP-195587 SEQ ID NOS: 190, 384, 578, 772, 966, 1160;
AIP-153462 SEQ ID NOS: 191, 385, 579, 773, 967, 1161;
AIP-115363 SEQ ID NOS: 192, 386, 580, 774, 968, 1162;
AIP-151090 SEQ ID NOS: 193, 387, 581, 775, 969, 1163;
AIP-168083 SEQ ID NOS: 194, 388, 582, 776, 970, 1164;
AIP-161082 SEQ ID NOS: 195, 389, 583, 777, 971, 1165;
AIP-114196 SEQ ID NOS: 196, 390, 584, 778, 972, 1166;
AIP-189338 SEQ ID NOS: 197, 391, 585, 779, 973, 1167
AIP-183190 SEQ ID NOS: 198, 392, 586, 780, 974, 1168;
AIP-110143 SEQ ID NOS: 199, 393, 587, 781, 975, 1169;
AIP-147176 SEQ ID NOS: 200, 394, 588, 782, 976, 1170;
AIP-134312 SEQ ID NOS: 201, 395, 589, 783, 977, 1171;
AIP-128243 SEQ ID NOS: 202, 396, 590, 784, 978, 1172;
AIP-156172 SEQ ID NOS: 203, 397, 591, 785, 979, 1173;
AIP-147389 SEQ ID NOS: 204, 398, 592, 786, 980, 1174;
AIP-124314 SEQ ID NOS: 205, 399, 593, 787, 981, 1175;
AIP-185291 SEQ ID NOS: 206, 400, 594, 788, 982, 1176;
AIP-135247 SEQ ID NOS: 207, 401, 595, 789, 983, 1177;
AIP-113513 SEQ ID NOS: 208, 402, 596, 790, 984, 1178;
AIP-102299 SEQ ID NOS: 209, 403, 597, 791, 985, 1179;
AIP-179097 SEQ ID NOS: 210, 404, 598, 792, 986, 1180
AIP-109343 SEQ ID NOS: 211, 405, 599, 793, 987, 1181;
AIP-119622 SEQ ID NOS: 212, 406, 600, 794, 988, 1182;
AIP-191735 SEQ ID NOS: 213, 407, 601, 795, 989, 1183;
AIP-157078 SEQ ID NOS: 214. 408, 602, 796, 990, 1184;
AIP-153475 SEQ ID NOS: 215, 409, 603, 797, 991, 1185;
AIP-133650 SEQ ID NOS: 216, 410, 604, 798, 992, 1186;
AIP-190915 SEQ ID NOS: 217, 411, 605, 799, 993, 1187;
AIP-167400 SEQ ID NOS: 219, 413, 607, 801, 995, 1189;
AIP-109729 SEQ ID NOS: 220, 414, 608, 802, 996, 1190;
AIP-151709 SEQ ID NOS: 221, 415, 609, 803, 997, 1191;
AIP-136628 SEQ ID NOS: 226, 420, 614, 808, 1002, 1196;
AIP-101601 SEQ ID NOS: 230, 424, 618, 812, 1006, 1200;
AIP-146871 SEQ ID NOS: 232, 426, 620, 814, 1008, 1202;
AIP-170053 SEQ ID NOS: 233, 427, 621, 815, 1009, 1203;
AIP-199483 SEQ ID NOS: 234, 428, 622, 816, 1010, 1204;
AIP-162041 SEQ ID NOS: 236, 430, 624, 818, 1012, 1206;
AIP-180675 SEQ ID NOS: 1, 9, 43, 48, 59, 68;
AIP-183133 SEQ ID NOS: 238, 432, 626, 820, 1014, 1208;
AIP-191470 SEQ ID NOS: 239, 433, 627, 821, 1015, 1209;
AIP-151167 SEQ ID NOS: 240, 434, 628, 822, 1016, 1210;
AIP-106633 SEQ ID NOS: 241, 435, 629, 823, 1017, 1211;
AIP-102624 SEQ ID NOS: 242, 436, 630, 824, 1018, 1212;
AIP-109484 SEQ ID NOS: 243, 437, 631, 825, 1019, 1213;
AIP-126080 SEQ ID NOS: 1, 9, 44, 48, 59, 68;
AIP-161571 SEQ ID NOS: 1, 9, 45, 48, 59, 68;
AIP-163039 SEQ ID NOS: 251, 445, 639, 833, 1027, 1221;
AIP-101235 SEQ ID NOS: 1, 9, 20, 48, 59, 68;
AIP-182061 SEQ ID NOS: 253, 447, 641, 835, 1029, 1223;
AIP-181246 SEQ ID NOS: 1, 9, 46, 48, 59, 68;
AIP-192216 SEQ ID NOS: 1, 9, 47, 48, 59, 68;
AIP-171912 SEQ ID NOS: 255, 449, 643, 837, 1031, 1225;
AIP-172872 SEQ ID NOS: 1, 18, 21, 48, 65, 75;
AIP-167833 SEQ ID NOS: 256, 450, 644, 838, 1032, 1226;
AIP-190051 SEQ ID NOS: 8, 9, 21, 58, 59, 72;
AIP-145518 SEQ ID NOS: 257, 451, 645, 839, 1033, 1227;
AIP-167533 SEQ ID NOS: 1, 19, 21, 48, 59, 68;
AIP-112580 SEQ ID NOS: 1, 9, 27, 48, 59, 68;
AIP-143155 SEQ ID NOS: 258, 452, 646, 840, 1034, 1228;
AIP-119664 SEQ ID NOS: 259, 453, 647, 841, 1035, 1229;
AIP-190526 SEQ ID NOS: 260, 454, 648, 842, 1036, 1230;
AIP-114403 SEQ ID NOS: 261, 455, 649, 843, 1037, 1231;
AIP-156760 SEQ ID NOS: 262, 456, 650, 844, 1038, 1232;
AIP-103803 SEQ ID NOS: 263, 457, 651, 845, 1039, 1233;
AIP-195588 SEQ ID NOS: 265, 459, 653, 847, 1041, 1235;
AIP-145722 SEQ ID NOS: 266, 460, 654, 848, 1042, 1236;
AIP-178251 SEQ ID NOS: 267, 461, 655, 849, 1043, 1237;
AIP-116142 SEQ ID NOS: 268, 462, 656, 850, 1044, 1238;
AIP-183350 SEQ ID NOS: 269, 463, 657, 851, 1045, 1239;
AIP-127108 SEQ ID NOS: 270, 464, 658, 852, 1046, 1240;
AIP-128147 SEQ ID NOS: 271, 465, 659, 853, 1047, 1241;
AIP-109510 SEQ ID NOS: 272, 466, 660, 854, 1048, 1241;
AIP-104086 SEQ ID NOS: 273, 467, 661, 855, 1049, 1243;
AIP-143132 SEQ ID NOS: 274, 468, 662, 856, 1050, 1244;
AIP-170105 SEQ ID NOS: 1, 9, 21, 56, 59, 68;
AIP-169636 SEQ ID NOS: 275; 469, 663, 857, 1051, 1245;
AIP-152243 SEQ ID NOS: 276, 470, 664, 858, 1052, 1246;
AIP-138776 SEQ ID NOS: 277, 471, 665, 859, 1053, 1247;
AIP-103817 SEQ ID NOS: 278, 472, 666, 860, 1054, 1248;
AIP-130491 SEQ ID NOS: 279, 473, 667, 861, 1055, 1249;
AIP-188155 SEQ ID NOS: 280, 474, 668, 862, 1056, 1250;
AIP-167246 SEQ ID NOS: 281, 475, 669, 863, 1057, 1251;
AIP-106139 SEQ ID NOS: 282, 476, 670, 864, 1058, 1252;
AIP-198351 SEQ ID NOS: 283, 477, 671, 865, 1059, 1253;
AIP-159326 SEQ ID NOS: 284, 478, 672, 866, 1060, 1254;
AIP-192275 SEQ ID NOS: 285, 479, 673, 867, 1061, 1255;
AIP-190761 SEQ ID NOS: 286, 480, 674, 868, 1062, 1256;
AIP-166832 SEQ ID NOS: 287, 481, 675, 869, 1063, 1257;
AIP-148062 SEQ ID NOS: 288, 482, 676, 870, 1064, 1258;
AIP-129145 SEQ ID NOS: 289, 483, 677, 871, 1065, 1259;
AIP-111240 SEQ ID NOS: 290, 484, 678, 872, 1066, 1260;
AIP-153888 SEQ ID NOS: 292, 486, 680, 874, 1068, 1262;
AIP-130915 SEQ ID NOS: 293, 487, 681, 875, 1069, 1263;
AIP-109048 SEQ ID NOS: 294, 488, 682, 876, 1070, 1264;
AIP-170569 SEQ ID NOS: 295, 489, 683, 877, 1071, 1265;
AIP-154873 SEQ ID NOS: 296, 490, 684, 878, 1072, 1266;
AIP-159037 SEQ ID NOS: 297, 491, 685, 879, 1073, 1267;
AIP-186826 SEQ ID NOS: 298, 492, 686, 880, 1074, 1268;
AIP-156514 SEQ ID NOS: 299, 493, 687, 881, 1075, 1269;
AIP-157122 SEQ ID NOS: 300, 494, 688, 882, 1076, 1270;
AIP-173276 SEQ ID NOS: 301, 495, 689, 883, 1077, 1271;
AIP-150485 SEQ ID NOS: 302, 496, 690, 884, 1078, 1272;
AIP-166847 SEQ ID NOS: 304, 498, 692, 886, 1080, 1274;
AIP-124013 SEQ ID NOS: 305, 499, 693, 887, 1081, 1275;
AIP-126285 SEQ ID NOS: 306, 500, 694, 888, 1082, 1276
AIP-168605 SEQ ID NOS: 1, 9, 21, 57, 59, 74;
AIP-190274 SEQ ID NOS: 307, 501, 695, 889, 1083, 1277;
AIP-136060 SEQ ID NOS: 1, 9, 21, 48, 67, 68;
AIP-180422 SEQ ID NOS: 310, 504, 698, 892, 1086, 1280;
AIP-166722 SEQ ID NOS: 311, 505, 699, 893, 1087, 1281;
AIP-127782 SEQ ID NOS: 1, 504, 21, 48, 59, 68;
AIP-189473 SEQ ID NOS: 1, 9, 22, 48, 59, 68;
AIP-192571 SEQ ID NOS: 1, 9, 23, 48, 59, 68;
AIP-112328 SEQ ID NOS: 322, 516, 710, 904, 1098, 1292;
AIP-125258 SEQ ID NOS: 1, 9, 24, 48, 59, 68;
AIP-150199 SEQ ID NOS: 1, 9, 25, 48, 59, 68;
AIP-125062 SEQ ID NOS: 324, 518, 712, 906, 1100, 1294;
AIP-177193 SEQ ID NOS: 331, 525, 719, 913, 1107, 1301;
AIP-115388 SEQ ID NOS: 1, 9, 26, 48, 59, 68;
AIP-107759 SEQ ID NOS: 338, 532, 726, 920, 1114, 1308;
AIP-170221 SEQ ID NOS: 355, 549, 743, 937, 1131, 1325;
AIP-143369 SEQ ID NOS: 2, 10, 21, 49, 60, 68;
AIP-189475 SEQ ID NOS: 357, 551, 745, 939, 1133, 1327;
AIP-102833 SEQ ID NOS: 358, 552, 746, 940, 1134, 1328;
AIP-157045 SEQ ID NOS: 3, 11, 21, 50, 61, 69;
AIP-175775 SEQ ID NOS: 4, 9, 27, 51, 62, 70;
AIP-154181 SEQ ID NOS: 5, 12, 28, 52, 63, 71;
AIP-125984 SEQ ID NOS: 6, 13, 21, 53, 64, 76;
AIP-160829 SEQ ID NOS: 7, 14, 29, 52, 65, 69;
AIP-184744 SEQ ID NOS: 4, 15, 30, 54, 62, 71;
AIP-128136 SEQ ID NOS: 1, 12, 31, 55, 66, 72;
AIP-181273 SEQ ID NOS: 1, 9, 32, 56, 59, 72;
AIP-153125 SEQ ID NOS: 1, 12, 33, 50, 66, 68; or
AIP-131972 SEQ ID NOS: 362, 556, 750, 944, 1138, 1332.

9. A method of treating a cancer patient having a tumor that comprises an extracellular RNA-protein complex, the method comprising administering to the patient an antibody that binds to tissue from the tumor, wherein the antibody comprises:
(a) a heavy chain variable region comprising:
(i) an HCDR1 having the sequence GF(T/V)(F/Y)(S/A)X₆AWM(S/T) (SEQ ID NO:1728), wherein X₆ is K, A, or M;
(ii) an HCDR2 having the sequence of RIK(S/A)X₅X₆(D/E)(G/A)X₉X₁₀T(D/E)YAA(P/S)VKG (SEQ ID NO:1729), wherein X₅ is V, N, A, or T; X₆ is T, Q, S, D, or H; X₉ is E, H, K, or G; and X₁₀ is T, Q, or I; and
(iii) an HCDR3 having the sequence of (I/T)(S/T)SFCC(H/R)(G/S)X₉X₁₀CPSX₁₄(D/E)TS(F/Y)CX₂₀(G/N)X₂₂X₂₃X₂₄X₂₅ (F/Y)Y(F/Y)(M/V)(D/N)X₃₁ (SEQ ID NO:1730), wherein X₉ is A, G, K, or N; X₁₀ is N, Q, R, or S; X₁₄ is H, R, or S; X₂₀ is A, G, or N; X₂₂ is Q, S, or Y; X₂₃ is D, F, N, or Y; X₂₄ is A, K, N, P, or S; X₂₅ is D, Q, R, or S; and X₃₁ is I, P, or V; and
(b) a light chain variable region comprising:
(i) an LCDR1 having the sequence of SG(S/A)X₄(S/T)(N/D)IGSSX₁₁VX₁₃ (SEQ ID NO:1731), wherein X₄ is S, P, or K; X₁₁ is S, Y, or T; and X₁₃ is S, Y, or T;
(ii) an LCDR2 having the sequence of (K/M)(N/D)X₃X₄R(P/A)X₇, wherein X₃ is S, N or T; X₄ is L, Q, or A; X₇ is Q, S, Y, or L; and
(iii) an LCDR3 having the sequence of (S/A)(T/S)W(D/N)X₅X₆(L/N)X₈(V/I)R(V/I), wherein X₅ is E, D or N; X₆ is S, A, or Q; and X₈ is N, S or T.

10. The method of claim 9, wherein:
the HCDR1 has a sequence GFTFSKAWMS (SEQ ID NO:1), GFTFSAAWMS (SEQ ID NO:4), or GFTFSKAWMT (SEQ ID NO:8);
the HCDR2 has a sequence RIKSVTDGETTDYAAPVKG (SEQ ID NO:9) or RIKSTSDGETTDYAAPVKG (SEQ ID NO:15);
the HCDR3 has a sequence TSSFCCRGGSCPSSDTSYCGGQYKSYYFMDV (SEQ ID NO:32), TSSFCCRSGSCPSSDTSYCNGQYKSYYYMDV (SEQ ID NO:20), TSSFCCRGNQCPSSDTSYCGGQYPSYYYMDP (SEQ ID NO:23), ISSFCCRGGSCPSRDTSYCGGQYKSYYFMDV (SEQ ID NO:30), ISSFCCRGNSCPSSDTSYCNGQYKSYYYMDV (SEQ ID NO:27), TSSFCCRGGSCPSHDTSYCGGQYKSYYYMDV (SEQ ID NO:21), or TSSFCCRGGSCPSHDTSFCGGQDKRYYYMDV (SEQ ID NO:34);
the LCDR1 has a sequence SGSSSNIGSSSVY (SEQ ID NO:56), SGSSSNIGSSSVS (SEQ ID NO:48), SGSSTNIGSSSVS (SEQ ID NO:54), or SGSKSNIGSSSVS (SEQ ID NO:51);
the LCDR2 has a sequence KNNQRPS (SEQ ID NO:59) or KDNQRPS (SEQ ID NO:62); and
the LCDR3 has a sequence STWDDALSVRV (SEQ ID NO:72), STWDDSLSVRV (SEQ ID NO:68), SSWDDSNSVRI (SEQ ID NO:71), or ATWDNSLSIRV (SEQ ID NO:70).

11. The method of claim 10, wherein the heavy chain variable region has a sequence having at least 90% identity to the sequence of any one of
(SEQ ID NO: 92)
EVQLVESGGALVKPGGSLRLSCAASGFTFSKAWMSWVRQAPGKGLEWVGR
IKSVTDGETTDYAAPVKGRFTISRDDSKSTLYLQMNSLKTEDTAVYYCTS
SFCCRGGSCPSSDTSYCGGQYKSYYFMDVWGKGTTVTVSS,
(SEQ ID NO: 77)
EVQLVESGGALVKPGGSLRLSCAASGFTFSKAWMSWVRQAPGKGLEWVGR
IKSVTDGETTDYAAPVKGRFTISRDDSKSTLYLQMNSLKTEDTAVYYCTS
SFCCRSGSCPSSDTSYCNGQYKSYYYMDVWGKGTTVTVSS,
(SEQ ID NO: 80)
EVQLVESGGALVKPGGSLRLSCAASGFTFSKAWMSWVRQAPGKGLEWVGR
IKSVTDGETTDYAAPVKGRFTISRDDSKSTLYLQMNSLKTEDTAVYYCTS
SFCCRGNQCPSSDTSYCGGQYPSYYYMDPWGKGTTVTVSS,
(SEQ ID NO: 90)
EVQLVESGGALVKPGGSLRLSCAASGFTFSAAWMSWVRQAPGKGLEWVGR
IKSTSDGETTDYAAPVKGRFTISRDDSKSTLYLQMNSLKTEDTAVYYCIS
SFCCRGGSCPSRDTSYCGGQYKSYYFMDVWGKGTTVTVSS,
(SEQ ID NO: 86)
EVQLVESGGALVKPGGSLRLSCAASGFTFSAAWMSWVRQAPGKGLEWVGR
IKSVTDGETTDYAAPVKGRFTISRDDSKSTLYLQMNSLKTEDTAVYYCIS
SFCCRGNSCPSSDTSYCNGQYKSYYYMDVWGKGTTVTVSS,
(SEQ ID NO: 94)
EVQLVESGGALVKPGGSLRLSCAASGFTFSKAWMSWVRQAPGKGLEWVGR
IKSVTDGETTDYAAPVKGRFTISRDDSKSTLYLQMNSLKTEDTAVYYCTS
SFCCRGGSCPSHDTSYCGGQYKSYYYMDVWGKGTTVTVSS,
and
(SEQ ID NO: 95)
EVQLVESGGALVKPGGSLRLSCAASGFTFSKAWMTWVRQAPGKGLEWVGR
IKSVTDGETTDYAAPVKGRFTISRDDSKSVLYLQMSSLKTEDTAVYFCTS
SFCCRGGSCPSHDTSFCGGQDKRYYYMDVWGKGTTVTVSS.

12. The method of claim 10, wherein the light chain variable region has a sequence having at least 90% identity to the sequence of any one of
(SEQ ID NO: 138)
QSVLTQPPSASGTPGQRVTISCSGSSSNIGSSSVYWYQQLPGTAPKWYKN
NQRPSGVPDRFSGSKSGTSASLAISGLRSEDEADYYCSTWDDALSVRVFG
GGTKLTVL,
(SEQ ID NO: 140)
QSVLTQPPSASGTPGQRVTISCSGSSSNIGSSSVSWYQQLPGTAPKLLIY
KNNQRPSGVPD,
(SEQ ID NO: 136)
RFSGSKSGTSASLAISGLRSEDEADYYCSTWDDSLSVRVFGGGTKLTVL,
QSVLTQPPSASGTPGQRVTISCSGSSTNIGSSSVSWYQQLPGTAPKLLIY
KDNQRPSGVPDRFSGSKSGTSASLAISGLRSEDEADYYCSSWDDSNSVRI
FGGGTKLTVL,
(SEQ ID NO: 132)
QSVLTQPPSASGTPGQRVTISCSGSKSNIGSSSVSWYQQLPGTAPKLLIY
KDNQRPSGVPDRFSGSKSGTSASLAISGLRSEDEADYYCATWDNSLSIRV
FGGGTKLTVL,
and
(SEQ ID NO: 141)
QSVLTQAPSASETPGQRVIISCSGSSSNIGSSSVSWYQQLPGTAPKLLIY
KNNQRPSGVPDRFSGSKSGTSASLAISGLRSEDEADYYCSTWDDSLSVRV
FGGGTKLTVL.

13. The method of claim 10, wherein:
the HCDR1 has a sequence GFTFSKAWMS (SEQ ID NO:1);
the HCDR2 has a sequence RIKSVTDGETTDYAAPVKG (SEQ ID NO:9);
the HCDR3 has a sequence TSSFCCRGGSCPSSDTSYCGGQYKSYYFMDV (SEQ ID NO:32);
the LCDR1 has a sequence SGSSSNIGSSSVY (SEQ ID NO:56);
the LCDR2 has a sequence KNNQRPS (SEQ ID NO:59); and
the LCDR3 has a sequence STWDDALSVRV (SEQ ID NO:72).

14. The method of claim 10, wherein:
the HCDR1 has a sequence GFTFSKAWMS (SEQ ID NO:1);
the HCDR2 has a sequence RIKSVTDGETTDYAAPVKG (SEQ ID NO:9);
the HCDR3 has a sequence of TSSFCCRSGSCPSSDTSYCNGQYKSYYYMDV (SEQ ID NO:20);
the LCDR1 has a sequence SGSSSNIGSSSVS (SEQ ID NO:48);
the LCDR2 has a sequence KNNQRPS (SEQ ID NO:59); and
the LCDR3 has a sequence STWDDSLSVRV (SEQ ID NO:68).

15. The method of claim 10, wherein:
the HCDR1 has a sequence GFTFSKAWMS (SEQ ID NO:1);
the HCDR2 has a sequence RIKSVTDGETTDYAAPVKG (SEQ ID NO:9);
the HCDR3 has a sequence TSSFCCRGNQCPSSDTSYCGGQYPSYYYMDP (SEQ ID NO:23);
the LCDR1 has a sequence SGSSSNIGSSSVS (SEQ ID NO:48);
the LCDR2 has a sequence KNNQRPS (SEQ ID NO:59); and
the LCDR3 has a sequence STWDDSLSVRV (SEQ ID NO:68).

16. The method of claim 10, wherein:
the HCDR1 has a sequence GFTFSAAWMS (SEQ ID NO:4);
the HCDR2 has a sequence RIKSTSDGETTDYAAPVKG (SEQ ID NO:15);
the HCDR3 has a sequence ISSFCCRGGSCPSRDTSYCGGQYKSYYFMDV (SEQ ID NO:30);
the LCDR1 has a sequence SGSSTNIGSSSVS (SEQ ID NO:54);
the LCDR2 has a sequence KDNQRPS (SEQ ID NO:62); and
the LCDR3 has a sequence SSWDDSNSVRI (SEQ ID NO:71).

17. The method of claim 10, wherein:
the HCDR1 has a sequence GFTFSAAWMS (SEQ ID NO:4);
the HCDR2 has a sequence RIKSVTDGETTDYAAPVKG (SEQ ID NO:9);
the HCDR3 has a sequence ISSFCCRGNSCPSSDTSYCNGQYKSYYYMDV (SEQ ID NO:27);
the LCDR1 has a sequence SGSKSNIGSSSVS (SEQ ID NO:51);
the LCDR2 has a sequence KDNQRPS (SEQ ID NO:62); and
the LCDR3 has a sequence ATWDNSLSIRV (SEQ ID NO:70).

18. The method of claim 10, wherein:
the HCDR1 has a sequence GFTFSKAWMT (SEQ ID NO:8);
the HCDR2 has a sequence RIKSVTDGETTDYAAPVKG (SEQ ID NO:9);
the HCDR3 has a sequence TSSFCCRGGSCPSHDTSFCGGQDKRYYYMDV (SEQ ID NO:34);
the LCDR1 has a sequence SGSSSNIGSSSVS (SEQ ID NO:48);
the LCDR2 has a sequence KNNQRPS (SEQ ID NO:59); and
the LCDR3 has a sequence STWDDSLSVRV (SEQ ID NO:68).

19. The method of claim 1, wherein the cancer is lung cancer, breast cancer, colorectal cancer, esophageal cancer, stomach cancer, kidney cancer, ovarian cancer, melanoma, uterine cancer, liver cancer, bladder cancer, or testicular cancer.

20. The method of claim 19, wherein the cancer is non-small cell lung cancer, triple negative breast cancer, colorectal cancer, ovarian cancer or melanoma.

21. The method of claim 1, wherein the antibody is administered intravenously.

22. The method of claim 1, further comprising administering chemotherapy and/or radiation therapy.

23. The method of claim 1, further comprising administering an agent that targets an immunological checkpoint antigen.

24. The method of claim 23, wherein the agent is a monoclonal antibody.

25. The method of claim 24, wherein the monoclonal antibody blocks PD-1 ligand binding to PD-1.

26. The method of claim 25, wherein the monoclonal antibody is an anti-PD-1 antibody.

27. The method of claim 9, wherein the cancer is lung cancer, breast cancer, colorectal cancer, esophageal cancer, stomach cancer, kidney cancer, ovarian cancer, melanoma, uterine cancer, liver cancer, bladder cancer, or testicular cancer.

28. The method of claim 27, wherein the cancer is non-small cell lung cancer, triple negative breast cancer, colorectal cancer, ovarian cancer or melanoma.

29. The method of claim 9, wherein the antibody is administered intravenously.

30. The method of claim 9, further comprising administering chemotherapy and/or radiation therapy.

31. The method of claim 9, further comprising administering an agent that targets an immunological checkpoint antigen.

32. The method of claim 31, wherein the agent is a monoclonal antibody.

33. The method of claim 32, wherein the monoclonal antibody blocks PD-1 ligand binding to PD-1.

34. The method of claim 33, wherein the monoclonal antibody is an anti-PD-1 antibody.

The application's sequence listing, which the Patent Office published only in electronic form, follows.

SEQUENCE LISTING (1772 sequences)

SEQ ID NO: 1 - protein, 10 aa, synthetic construct
  REGION 1..10: note = Description of Artificial Sequence: Syntheticpeptide
GFTFSKAWMS

SEQ ID NO: 2 - protein, 10 aa, synthetic construct
  REGION 1..10: note = Description of Artificial Sequence: Syntheticpeptide
GFTYSAAWMS

SEQ ID NO: 3 - protein, 10 aa, synthetic construct
  REGION 1..10: note = Description of Artificial Sequence: Syntheticpeptide
GFTFSMAWMS

SEQ ID NO: 4 - protein, 10 aa, synthetic construct
  REGION 1..10: note = Description of Artificial Sequence: Syntheticpeptide
GFTFSAAWMS

SEQ ID NO: 5 - protein, 10 aa, synthetic construct
  REGION 1..10: note = Description of Artificial Sequence: Syntheticpeptide
GFTYSKAWMS

SEQ ID NO: 6 - protein, 10 aa, synthetic construct
  REGION 1..10: note = Description of Artificial Sequence: Syntheticpeptide
GFTFAKAWMS

SEQ ID NO: 7 - protein, 10 aa, synthetic construct
  REGION 1..10: note = Description of Artificial Sequence: Syntheticpeptide
GFVFSKAWMS

SEQ ID NO: 8 - protein, 10 aa, synthetic construct
  REGION 1..10: note = Description of Artificial Sequence: Syntheticpeptide
GFTFSKAWMT

SEQ ID NO: 9 - protein, 19 aa, synthetic construct
  REGION 1..19: note = Description of Artificial Sequence: Syntheticpeptide
RIKSVTDGETTDYAAPVKG

SEQ ID NO: 10 - protein, 19 aa, synthetic construct
  REGION 1..19: note = Description of Artificial Sequence: Syntheticpeptide
RIKAVHDGETTDYAAPVKG

SEQ ID NO: 11 - protein, 19 aa, synthetic construct
  REGION 1..19: note = Description of Artificial Sequence: Syntheticpeptide
RIKSNTDAETTDYAAPVKG

SEQ ID NO: 12 - protein, 19 aa, synthetic construct
  REGION 1..19: note = Description of Artificial Sequence: Syntheticpeptide
RIKSVQDGETTDYAAPVKG

SEQ ID NO: 13 - protein, 19 aa, synthetic construct
  REGION 1..19: note = Description of Artificial Sequence: Syntheticpeptide
RIKSVTDGHTTDYAAPVKG

SEQ ID NO: 14 - protein, 19 aa, synthetic construct
  REGION 1..19: note = Description of Artificial Sequence: Syntheticpeptide
RIKSVTDGGITDYAAPVKG

SEQ ID NO: 15 - protein, 19 aa, synthetic construct
  REGION 1..19: note = Description of Artificial Sequence: Syntheticpeptide
RIKSTSDGETTDYAAPVKG

SEQ ID NO: 16 - protein, 19 aa, synthetic construct
  REGION 1..19: note = Description of Artificial Sequence: Syntheticpeptide
RIKSTSDGGITDYAAPVKG

SEQ ID NO: 17 - protein, 19 aa, synthetic construct
  REGION 1..19: note = Description of Artificial Sequence: Syntheticpeptide
RIKSVTEGETTDYAAPVKG

SEQ ID NO: 18 - protein, 19 aa, synthetic construct
  REGION 1..19: note = Description of Artificial Sequence: Syntheticpeptide
RIKSVTDGEQTDYAAPVKG

SEQ ID NO: 19 - protein, 19 aa, synthetic construct
  REGION 1..19: note = Description of Artificial Sequence: Syntheticpeptide
RIKAADDGKQTDYAAPVKG

SEQ ID NO: 20 - protein, 31 aa, synthetic construct
  REGION 1..31: note = Description of Artificial Sequence: Syntheticpolypeptide
TSSFCCRSGSCPSSDTSYCNGQYKSYYYMDV

SEQ ID NO: 21 - protein, 31 aa, synthetic construct
  REGION 1..31: note = Description of Artificial Sequence: Syntheticpolypeptide
TSSFCCRGGSCPSHDTSYCGGQYKSYYYMDV

SEQ ID NO: 22 - protein, 31 aa, synthetic construct
  REGION 1..31: note = Description of Artificial Sequence: Syntheticpolypeptide
TTSFCCRGASCPSSDTSYCAGSYKSYYFVNI

SEQ ID NO: 23 - protein, 31 aa, synthetic construct
  REGION 1..31: note = Description of Artificial Sequence: Syntheticpolypeptide
TSSFCCRGNQCPSSDTSYCGGQYPSYYYMDP

SEQ ID NO: 24 - protein, 31 aa, synthetic construct
  REGION 1..31: note = Description of Artificial Sequence: Syntheticpolypeptide
ISSFCCRGKQCPSSDTSYCNGYYADYYFMDV

SEQ ID NO: 25 - protein, 31 aa, synthetic construct
  REGION 1..31: note = Description of Artificial Sequence: Syntheticpolypeptide
ISSFCCRGKQCPSSDTSYCGGQFKSYYFMDV

SEQ ID NO: 26 - protein, 31 aa, synthetic construct
  REGION 1..31: note = Description of Artificial Sequence: Syntheticpolypeptide
ISSFCCHSNNCPSSDTSYCNGYYKQYYFMDV

SEQ ID NO: 27 - protein, 31 aa, synthetic construct
  REGION 1..31: note = Description of Artificial Sequence: Syntheticpolypeptide
ISSFCCRGNSCPSSDTSYCNGQYKSYYYMDV

SEQ ID NO: 28 - protein, 31 aa, synthetic construct
  REGION 1..31: note = Description of Artificial Sequence: Syntheticpolypeptide
TSSFCCRGGSCPSHDTSYCGGQYKSFYYMDV

SEQ ID NO: 29 - protein, 31 aa, synthetic construct
  REGION 1..31: note = Description of Artificial Sequence: Syntheticpolypeptide
ISSFCCRGNSCPSSDTSYCNGQYKSYYFMDV

SEQ ID NO: 30 - protein, 31 aa, synthetic construct
  REGION 1..31: note = Description of Artificial Sequence: Syntheticpolypeptide
ISSFCCRGGSCPSRDTSYCGGQYKSYYFMDV

SEQ ID NO: 31 - protein, 31 aa, synthetic construct
  REGION 1..31: note = Description of Artificial Sequence: Syntheticpolypeptide
TSSFCCRGGSCPSSDTSYCGGYYKSYYFMDV

SEQ ID NO: 32 - protein, 31 aa, synthetic construct
  REGION 1..31: note = Description of Artificial Sequence: Syntheticpolypeptide
TSSFCCRGGSCPSSDTSYCGGQYKSYYFMDV

SEQ ID NO: 33 - protein, 31 aa, synthetic construct
  REGION 1..31: note = Description of Artificial Sequence: Syntheticpolypeptide
TSSFCCRGGSCPSHDTSYCGGYYKSYYYMDV

SEQ ID NO: 34 - protein, 31 aa, synthetic construct
  REGION 1..31: note = Description of Artificial Sequence: Syntheticpolypeptide
TSSFCCRGGSCPSHDTSFCGGQDKRYYYMDV

SEQ ID NO: 35 - protein, 31 aa, synthetic construct
  REGION 1..31: note = Description of Artificial Sequence: Syntheticpolypeptide
TTSFCCRGGSCPSHDTSFCGGQDKRYYYMDV

SEQ ID NO: 36 - protein, 31 aa, synthetic construct
  REGION 1..31: note = Description of Artificial Sequence: Syntheticpolypeptide
TSSFCCRGGSCPSHDTSFCGGQYNRYYYMDV

SEQ ID NO: 37 - protein, 31 aa, synthetic construct
  REGION 1..31: note = Description of Artificial Sequence: Syntheticpolypeptide
TSSFCCRGGSCPSHDTSFCGGQYKSYYYMDV

SEQ ID NO: 38 - protein, 31 aa, synthetic construct
  REGION 1..31: note = Description of Artificial Sequence: Syntheticpolypeptide
TTSFCCRGGRCPSRDTSFCGGQYNSYYYMDV

SEQ ID NO: 39 - protein, 31 aa, synthetic construct
  REGION 1..31: note = Description of Artificial Sequence: Syntheticpolypeptide
TTSFCCRGGSCPSHDTSFCGGQYKSYYYMDV

SEQ ID NO: 40 - protein, 31 aa, synthetic construct
  REGION 1..31: note = Description of Artificial Sequence: Syntheticpolypeptide
TSSFCCRGGSCPSHDTSFCGGQDSRYYYMDV

SEQ ID NO: 41 - protein, 31 aa, synthetic construct
  REGION 1..31: note = Description of Artificial Sequence: Syntheticpolypeptide
TSSFCCRGGSCPSHDTSFCGGSYKSYYYMDV

SEQ ID NO: 42 - protein, 31 aa, synthetic construct
  REGION 1..31: note = Description of Artificial Sequence: Syntheticpolypeptide
TSSFCCRGGSCPSHDTSYCGGQDSRYYYMDV

SEQ ID NO: 43 - protein, 31 aa, synthetic construct
  REGION 1..31: note = Description of Artificial Sequence: Syntheticpolypeptide
TSSFCCRGGSCPSHDTSYCGGQYKSYYFMDV

SEQ ID NO: 44 - protein, 31 aa, synthetic construct
  REGION 1..31: note = Description of Artificial Sequence: Syntheticpolypeptide
TSSFCCRGGSCPSHDTSYCGGQNKQYYYMDV

SEQ ID NO: 45 - protein, 31 aa, synthetic construct
  REGION 1..31: note = Description of Artificial Sequence: Syntheticpolypeptide
TSSFCCRGGNCPSHETSYCGNQYKSYYYMDV

SEQ ID NO: 46 - protein, 31 aa, synthetic construct
  REGION 1..31: note = Description of Artificial Sequence: Syntheticpolypeptide
TSSFCCRGGSCPSHDTSYCGGQYKSYYYVNI

SEQ ID NO: 47 - protein, 31 aa, synthetic construct
  REGION 1..31: note = Description of Artificial Sequence: Syntheticpolypeptide
TTSFCCRGASCPSHDTSYCAGSYKSYYYMDV

SEQ ID NO: 48 - protein, 13 aa, synthetic construct
  REGION 1..13: note = Description of Artificial Sequence: Syntheticpeptide
SGSSSNIGSSSVS

SEQ ID NO: 49 - protein, 13 aa, synthetic construct
  REGION 1..13: note = Description of Artificial Sequence: Syntheticpeptide
SGSSTNIGSSSVT

SEQ ID NO: 50 - protein, 13 aa, synthetic construct
  REGION 1..13: note = Description of Artificial Sequence: Syntheticpeptide
SGSKSNIGSSYVS

SEQ ID NO: 51 - protein, 13 aa, synthetic construct
  REGION 1..13: note = Description of Artificial Sequence: Syntheticpeptide
SGSKSNIGSSSVS

SEQ ID NO: 52 - protein, 13 aa, synthetic construct
  REGION 1..13: note = Description of Artificial Sequence: Syntheticpeptide
SGASSNIGSSSVS

SEQ ID NO: 53 - protein, 13 aa, synthetic construct
  REGION 1..13: note = Description of Artificial Sequence: Syntheticpeptide
SGSSTNIGSSTVS

SEQ ID NO: 54 - protein, 13 aa, synthetic construct
  REGION 1..13: note = Description of Artificial Sequence: Syntheticpeptide
SGSSTNIGSSSVS

SEQ ID NO: 55 - protein, 13 aa, synthetic construct
  REGION 1..13: note = Description of Artificial Sequence: Syntheticpeptide
SGSKSNIGSSSVY

SEQ ID NO: 56 - protein, 13 aa, synthetic construct
  REGION 1..13: note = Description of Artificial Sequence: Syntheticpeptide
SGSSSNIGSSSVY

SEQ ID NO: 57 - protein, 13 aa, synthetic construct
  REGION 1..13: note = Description of Artificial Sequence: Syntheticpeptide
SGSSSDIGSSSVS

SEQ ID NO: 58 - protein, 13 aa, synthetic construct
  REGION 1..13: note = Description of Artificial Sequence: Syntheticpeptide
SGSPSNIGSSSVS

SEQ ID NO: 59 - protein, 7 aa, synthetic construct
  REGION 1..7: note = Description of Artificial Sequence: Syntheticpeptide
KNNQRPS

SEQ ID NO: 60 - protein, 7 aa, synthetic construct
  REGION 1..7: note = Description of Artificial Sequence: Syntheticpeptide
KDNQRPL

SEQ ID NO: 61 - protein, 7 aa, synthetic construct
  REGION 1..7: note = Description of Artificial Sequence: Syntheticpeptide
MNNQRPY

SEQ ID NO: 62 - protein, 7 aa, synthetic construct
  REGION 1..7: note = Description of Artificial Sequence: Syntheticpeptide
KDNQRPS

SEQ ID NO: 63 - protein, 7 aa, synthetic construct
  REGION 1..7: note = Description of Artificial Sequence: Syntheticpeptide
KNTQRAS

SEQ ID NO: 64 - protein, 7 aa, synthetic construct
  REGION 1..7: note = Description of Artificial Sequence: Syntheticpeptide
KNNARPY

SEQ ID NO: 65 - protein, 7 aa, synthetic construct
  REGION 1..7: note = Description of Artificial Sequence: Syntheticpeptide
KNTQRPS

SEQ ID NO: 66 - protein, 7 aa, synthetic construct
  REGION 1..7: note = Description of Artificial Sequence: Syntheticpeptide
KNNQRPY

SEQ ID NO: 67 - protein, 7 aa, synthetic construct
  REGION 1..7: note = Description of Artificial Sequence: Syntheticpeptide
KNSLRPQ

SEQ ID NO: 68 - protein, 11 aa, synthetic construct
  REGION 1..11: note = Description of Artificial Sequence: Syntheticpeptide
STWDDSLSVRV

SEQ ID NO: 69 - protein, 11 aa, synthetic construct
  REGION 1..11: note = Description of Artificial Sequence: Syntheticpeptide
ATWDDQLSVRV

SEQ ID NO: 70 - protein, 11 aa, synthetic construct
  REGION 1..11: note = Description of Artificial Sequence: Syntheticpeptide
ATWDNSLSIRV

SEQ ID NO: 71 - protein, 11 aa, synthetic construct
  REGION 1..11: note = Description of Artificial Sequence: Syntheticpeptide
SSWDDSNSVRI

SEQ ID NO: 72 - protein, 11 aa, synthetic construct
  REGION 1..11: note = Description of Artificial Sequence: Syntheticpeptide
STWDDALSVRV

SEQ ID NO: 73 - protein, 11 aa, synthetic construct
  REGION 1..11: note = Description of Artificial Sequence: Syntheticpeptide
STWDESLSVRV

SEQ ID NO: 74 - protein, 11 aa, synthetic construct
  REGION 1..11: note = Description of Artificial Sequence: Syntheticpeptide
STWNDALSVRV

SEQ ID NO: 75 - protein, 11 aa, synthetic construct
  REGION 1..11: note = Description of Artificial Sequence: Syntheticpeptide
STWDDSLNVRV

SEQ ID NO: 76 - protein, 11 aa, synthetic construct
  REGION 1..11: note = Description of Artificial Sequence: Syntheticpeptide
ATWDDSLTVRI

SEQ ID NO: 77 - protein, 140 aa, synthetic construct
  REGION 1..140: note = Description of Artificial Sequence: Syntheticpolypeptide
EVQLVESGGALVKPGGSLRLSCAASGFTFSKAWMSWVRQAPGKGLEWVGRIKSVTDGETTDYAAPVKGRFTISRDDSKSTLYLQMNSLKTEDTAVYYCTSSFCCRSGSCPSSDTSYCNGQYKSYYYMDVWGKGTTVTVSS

SEQ ID NO: 78 - protein, 140 aa, synthetic construct
  REGION 1..140: note = Description of Artificial Sequence: Syntheticpolypeptide
EVQLVESGGGLVQPGGSLRLSCAASGFTFSKAWMSWVRQAPGKGLEWVGRIKSVTDGETTEYAASVKGRFTISRDDSKNSLYLQMNSLKTEDTAVYYCTSSFCCRGGSCPSHDTSYCGGQYKSYYYMDVWGKGTTVTVSS

SEQ ID NO: 79 - protein, 140 aa, synthetic construct
  REGION 1..140: note = Description of Artificial Sequence: Syntheticpolypeptide
EVQLVESGGALVKPGGSLRLSCAASGFTFSKAWMSWVRQAPGKGLEWVGRIKSVTDGETTDYAAPVKGRFTISRDDSKSTLYLQMNSLKTEDTAVYYCTTSFCCRGASCPSSDTSYCAGSYKSYYFVNIWGKGTTVTVSS

SEQ ID NO: 80 - protein, 140 aa, synthetic construct
  REGION 1..140: note = Description of Artificial Sequence: Syntheticpolypeptide
EVQLVESGGALVKPGGSLRLSCAASGFTFSKAWMSWVRQAPGKGLEWVGRIKSVTDGETTDYAAPVKGRFTISRDDSKSTLYLQMNSLKTEDTAVYYCTSSFCCRGNQCPSSDTSYCGGQYPSYYYMDPWGKGTTVTVSS

SEQ ID NO: 81 - protein, 140 aa, synthetic construct
  REGION 1..140: note = Description of Artificial Sequence: Syntheticpolypeptide
EVQLVESGGALVKPGGSLRLSCAASGFTFSKAWMSWVRQAPGKGLEWVGRIKSVTDGETTDYAAPVKGRFTISRDDSKSTLYLQMNSLKTEDTAVYYCISSFCCRGKQCPSSDTSYCNGYYADYYFMDVWGKGTTVTVSS

SEQ ID NO: 82 - protein, 140 aa, synthetic construct
  REGION 1..140: note = Description of Artificial Sequence: Syntheticpolypeptide
EVQLVESGGALVKPGGSLRLSCAASGFTFSKAWMSWVRQAPGKGLEWVGRIKSVTDGETTDYAAPVKGRFTISRDDSKSTLYLQMNSLKTEDTAVYYCISSFCCRGKQCPSSDTSYCGGQFKSYYFMDVWGKGTTVTVSS

SEQ ID NO: 83 - protein, 140 aa, synthetic construct
  REGION 1..140: note = Description of Artificial Sequence: Syntheticpolypeptide
EVQLVESGGALVKPGGSLRLSCAASGFTFSKAWMSWVRQAPGKGLEWVGRIKSVTDGETTDYAAPVKGRFTISRDDSKSTLYLQMNSLKTEDTAVYYCISSFCCHSNNCPSSDTSYCNGYYKQYYFMDVWGKGTTVTVSS

SEQ ID NO: 84 - protein, 140 aa, synthetic construct
  REGION 1..140: note = Description of Artificial Sequence: Syntheticpolypeptide
EVQLVESGGALVKPGGSLRLSCAASGFTYSAAWMSWVRQAPGKGLEWVGRIKAVHDGETTDYAAPVKGRFTISRDDSKSTLYLQMNSLKTEDTAVYYCTSSFCCRGGSCPSHDTSYCGGQYKSYYYMDVWGKGTTVTVSS

SEQ ID NO: 85 - protein, 140 aa, synthetic construct
  REGION 1..140: note = Description of Artificial Sequence: Syntheticpolypeptide
EVQLVESGGALVKPGGSLRLSCAASGFTFSMAWMSWVRQAPGKGLEWVGRIKSNTDAETTDYAAPVKGRFTISRDDSKSTLYLQMNSLKTEDTAVYYCTSSFCCRGGSCPSHDTSYCGGQYKSYYYMDVWGKGTTVTVSS

SEQ ID NO: 86 - protein, 140 aa, synthetic construct
  REGION 1..140: note = Description of Artificial Sequence: Syntheticpolypeptide
EVQLVESGGALVKPGGSLRLSCAASGFTFSAAWMSWVRQAPGKGLEWVGRIKSVTDGETTDYAAPVKGRFTISRDDSKSTLYLQMNSLKTEDTAVYYCISSFCCRGNSCPSSDTSYCNGQYKSYYYMDVWGKGTTVTVSS

SEQ ID NO: 87 - protein, 140 aa, synthetic construct
  REGION 1..140: note = Description of Artificial Sequence: Syntheticpolypeptide
EVQLVESGGALVKPGGSLRLSCAASGFTYSKAWMSWVRQAPGKGLEWVGRIKSVQDGETTDYAAPVKGRFTISRDDSKSTLYLQMNSLKTEDTAVYYCTSSFCCRGGSCPSHDTSYCGGQYKSFYYMDVWGKGTTVTVSS

SEQ ID NO: 88 - protein, 140 aa, synthetic construct
  REGION 1..140: note = Description of Artificial Sequence: Syntheticpolypeptide
EVQLVESGGALVKPGGSLRLSCAASGFTFAKAWMSWVRQAPGKGLEWVGRIKSVTDGHTTDYAAPVKGRFTISRDDSKSTLYLQMNSLKTEDTAVYYCTSSFCCRGGSCPSHDTSYCGGQYKSYYYMDVWGKGTTVTVSS

SEQ ID NO: 89 - protein, 140 aa, synthetic construct
  REGION 1..140: note = Description of Artificial Sequence: Syntheticpolypeptide
EVQLVESGGALVKPGGSLRLSCAASGFVFSKAWMSWVRQAPGKGLEWVGRIKSVTDGGITDYAAPVKGRFTISRDDSKSTLYLQMNSLKTEDTAVYYCISSFCCRGNSCPSSDTSYCNGQYKSYYFMDVWGKGTTVTVSS

SEQ ID NO: 90 - protein, 140 aa, synthetic construct
  REGION 1..140: note = Description of Artificial Sequence: Syntheticpolypeptide
EVQLVESGGALVKPGGSLRLSCAASGFTFSAAWMSWVRQAPGKGLEWVGRIKSTSDGETTDYAAPVKGRFTISRDDSKSTLYLQMNSLKTEDTAVYYCISSFCCRGGSCPSRDTSYCGGQYKSYYFMDVWGKGTTVTVSS

SEQ ID NO: 91 - protein, 140 aa, synthetic construct
  REGION 1..140: note = Description of Artificial Sequence: Syntheticpolypeptide
EVQLVESGGALVKPGGSLRLSCAASGFTFSKAWMSWVRQAPGKGLEWVGRIKSVQDGETTDYAAPVKGRFTISRDDSKSTLYLQMNSLKTEDTAVYYCTSSFCCRGGSCPSSDTSYCGGYYKSYYFMDVWGKGTTVTVSS

SEQ ID NO: 92 - protein, 140 aa, synthetic construct
  REGION 1..140: note = Description of Artificial Sequence: Syntheticpolypeptide
EVQLVESGGALVKPGGSLRLSCAASGFTFSKAWMSWVRQAPGKGLEWVGRIKSVTDGETTDYAAPVKGRFTISRDDSKSTLYLQMNSLKTEDTAVYYCTSSFCCRGGSCPSSDTSYCGGQYKSYYFMDVWGKGTTVTVSS

SEQ ID NO: 93 - protein, 140 aa, synthetic construct
  REGION 1..140: note = Description of Artificial Sequence: Syntheticpolypeptide
EVQLVESGGALVKPGGSLRLSCAASGFTFSKAWMSWVRQAPGKGLEWVGRIKSVQDGETTDYAAPVKGRFTISRDDSKSTLYLQMNSLKTEDTAVYYCTSSFCCRGGSCPSHDTSYCGGYYKSYYYMDVWGKGTTVTVSS

SEQ ID NO: 94 - protein, 140 aa, synthetic construct
  REGION 1..140: note = Description of Artificial Sequence: Syntheticpolypeptide
EVQLVESGGALVKPGGSLRLSCAASGFTFSKAWMSWVRQAPGKGLEWVGRIKSVTDGETTDYAAPVKGRFTISRDDSKSTLYLQMNSLKTEDTAVYYCTSSFCCRGGSCPSHDTSYCGGQYKSYYYMDVWGKGTTVTVSS

SEQ ID NO: 95 - protein, 140 aa, synthetic construct
  REGION 1..140: note = Description of Artificial Sequence: Syntheticpolypeptide
EVQLVESGGALVKPGGSLRLSCAASGFTFSKAWMTWVRQAPGKGLEWVGRIKSVTDGETTDYAAPVKGRFTISRDDSKSVLYLQMSSLKTEDTAVYFCTSSFCCRGGSCPSHDTSFCGGQDKRYYYMDVWGKGTTVTVSS

SEQ ID NO: 96 - protein, 140 aa, synthetic construct
  REGION 1..140: note = Description of Artificial Sequence: Syntheticpolypeptide
EVQLVESGGGLVKPGGSLRLSCAASGFTFSKAWMTWVRQAPGKGLEWVGRIKSVTDGETTDYAAPVKGRFTISRDDSKNTLYLQMNSLKTEDTAVYYCTTSFCCRGGSCPSHDTSFCGGQDKRYYYMDVWGQGTTVTVSS

SEQ ID NO: 97 - protein, 140 aa, synthetic construct
  REGION 1..140: note = Description of Artificial Sequence: Syntheticpolypeptide
EVQLVESGGALVKPGGSLRLSCAASGFTFSKAWMTWVRQAPGKGLEWVGRIKSVTDGETTDYAAPVKGRFTISRDDSKSVLYLQMSSLKTEDTAVYFCTSSFCCRGGSCPSHDTSFCGGQYNRYYYMDVWGKGTTVTVSS

SEQ ID NO: 98 - protein, 140 aa, synthetic construct
  REGION 1..140: note = Description of Artificial Sequence: Syntheticpolypeptide
EVQLVESGGALVKPGGSLRLSCAASGFTFSKAWMTWVRQAPGKGLEWVGRIKSVTDGETTDYAAPVKGRFTISRDDSKSVLYLQMSSLKTEDTAVYFCTSSFCCRGGSCPSHDTSFCGGQYKSYYYMDVWGKGTTVTVSS

SEQ ID NO: 99 - protein, 140 aa, synthetic construct
  REGION 1..140: note = Description of Artificial Sequence: Syntheticpolypeptide
EVQLVESGGGLVKPGGSLRLSCAASGFTFSKAWMTWVRQAPGKGLEWVGRIKSTSDGGITDYAAPVKGRFTISRDDSKNTLYLQMNSLKTEDTAVYYCTTSFCCRGGRCPSRDTSFCGGQYNSYYYMDVWGQGTTVTVSS

SEQ ID NO: 100 - protein, 140 aa, synthetic construct
  REGION 1..140: note = Description of Artificial Sequence: Syntheticpolypeptide
EVQLVESGGALVKPGGSLRLSCAASGFTFSKAWMTWVRQAPGKGLEWVGRIKSVTDGETTDYAAPVKGRFTISRDDSKSTLYLQMNSLKTEDTAVYYCTSSFCCRGGSCPSHDTSFCGGQDKRYYYMDVWGKGTTVTVSS

SEQ ID NO: 101 - protein, 140 aa, synthetic construct
  REGION 1..140: note = Description of Artificial Sequence: Syntheticpolypeptide
EVQLVESGGALVKPGGSLRLSCAASGFTFSKAWMTWVRQAPGKGLEWVGRIKSVTDGETTDYAAPVKGRFTISRDDSKSTLYLQMNSLKTEDTAVYYCTSSFCCRGGSCPSHDTSFCGGQYKSYYYMDVWGKGTTVTVSS

SEQ ID NO: 102 - protein, 140 aa, synthetic construct
  REGION 1..140: note = Description of Artificial Sequence: Syntheticpolypeptide
EVQLVESGGGLVKPGGSLRLSCAASGFTFSKAWMTWVRQAPGKGLEWVGRIKSVTDGETTDYAAPVKGRFTISRDDSKNTLYLQMNSLKTEDTAVYYCTTSFCCRGGSCPSHDTSFCGGQYKSYYYMDVWGQGTTVTVSS

SEQ ID NO: 103 - protein, 140 aa, synthetic construct
  REGION 1..140: note = Description of Artificial Sequence: Syntheticpolypeptide
EVQLVESGGALVKPGGSLRLSCAASGFTFSKAWMTWVRQAPGKGLEWVGRIKSVTDGETTDYAAPVKGRFTISRDDSKSTLYLQMNSLKTEDTAVYYCTSSFCCRGGSCPSHDTSFCGGQDSRYYYMDVWGKGTTVTVSS

SEQ ID NO: 104 - protein, 140 aa, synthetic construct
  REGION 1..140: note = Description of Artificial Sequence: Syntheticpolypeptide
EVQLVESGGALVKPGGSLRLSCAASGFTFSKAWMTWVRQAPGKGLEWVGRIKSVTDGETTDYAAPVKGRFTISRDDSKSTLYLQMNSLKTEDTAVYYCTSSFCCRGGSCPSHDTSYCGGQYKSYYYMDVWGKGTTVTVSS

SEQ ID NO: 105 - protein, 140 aa, synthetic construct; identical to SEQ ID NO: 101
  REGION 1..140: note = Description of Artificial Sequence: Syntheticpolypeptide

SEQ ID NO: 106 - protein, 140 aa, synthetic construct
  REGION 1..140: note = Description of Artificial Sequence: Syntheticpolypeptide
EVQLVESGGALVKPGGSLRLSCAASGFTFSKAWMSWVRQAPGKGLEWVGRIKSVTDGETTDYAAPVKGRFTISRDDSKSTLYLQMNSLKTEDTAVYYCTSSFCCRGGSCPSHDTSFCGGQYKSYYYMDVWGKGTTVTVSS

SEQ ID NO: 107 - protein, 140 aa, synthetic construct
  REGION 1..140: note = Description of Artificial Sequence: Syntheticpolypeptide
EVQLVESGGALVKPGGSLRLSCAASGFTFSKAWMTWVRQAPGKGLEWVGRIKSVTDGETTDYAAPVKGRFTISRDDSKSTLYLQMNSLKTEDTAVYYCTSSFCCRGGSCPSHDTSFCGGSYKSYYYMDVWGKGTTVTVSS

SEQ ID NO: 108 - protein, 140 aa, synthetic construct
  REGION 1..140: note = Description of Artificial Sequence: Syntheticpolypeptide
EVQLVESGGALVKPGGSLRLSCAASGFTFSKAWMTWVRQAPGKGLEWVGRIKSVTDGETTDYAAPVKGRFTISRDDSKSTLYLQMNSLKTEDTAVYYCTSSFCCRGGSCPSHDTSYCGGQDSRYYYMDVWGKGTTVTVSS

SEQ ID NO: 109 - protein, 140 aa, synthetic construct
  REGION 1..140: note = Description of Artificial Sequence: Syntheticpolypeptide
EVQLVESGGGLVKPGGSLRLSCAASGFTFSKAWMTWVRQAPGKGLEWVGRIKSVTEGETTDYAAPVKGRFTISRDDSKNTLYLQMNSLKTEDTAVYYCTTSFCCRGGSCPSHDTSFCGGQYKSYYYMDVWGQGTTVTVSS

SEQ ID NO: 110 - protein, 140 aa, synthetic construct
  REGION 1..140: note = Description of Artificial Sequence: Syntheticpolypeptide
EVQLVESGGALVKPGGSLRLSCAASGFTFSKAWMTWVRQAPGKGLEWVGRIKSVTEGETTDYAAPVKGRFTISRDDSKSTLYLQMNSLKTEDTAVYYCTSSFCCRGGSCPSHDTSFCGGQYKSYYYMDVWGKGTTVTVSS

SEQ ID NO: 111 - protein, 140 aa, synthetic construct
  REGION 1..140: note = Description of Artificial Sequence: Syntheticpolypeptide
EVQLVESGGALVKPGGSLRLSCAASGFTFSKAWMSWVRQAPGKGLEWVGRIKSVTDGETTDYAAPVKGRFTISRDDSKSTLYLQMNSLKTEDTAVYYCTSSFCCRGGSCPSHDTSYCGGQYKSYYFMDVWGKGTTVTVSS

SEQ ID NO: 112 - protein, 140 aa, synthetic construct; identical to SEQ ID NO: 94
  REGION 1..140: note = Description of Artificial Sequence: Syntheticpolypeptide

SEQ ID NO: 113 - protein, 140 aa, synthetic construct
  REGION 1..140: note = Description of Artificial Sequence: Syntheticpolypeptide
EVQLVESGGALVKPGGSLRLSCAASGFTFSKAWMSWVRQAPGKGLEWVGRIKSVTDGETTDYAAPVKGRFTISRDDSKSTLYLQMNSLKTEDTAVYYCTSSFCCRGGSCPSHDTSYCGGQNKQYYYMDVWGKGTTVTVSS

SEQ ID NO: 114 - protein, 140 aa, synthetic construct
  REGION 1..140: note = Description of Artificial Sequence: Syntheticpolypeptide
EVQLVESGGALVKPGGSLRLSCAASGFTFSKAWMSWVRQAPGKGLEWVGRIKSVTDGETTDYAAPVKGRFTISRDDSKSTLYLQMNSLKTEDTAVYYCTSSFCCRGGNCPSHETSYCGNQYKSYYYMDVWGKGTTVTVSS

SEQ ID NO: 115 - protein, 140 aa, synthetic construct
  REGION 1..140: note = Description of Artificial Sequence: Syntheticpolypeptide
EVQLVESGGALVKPGGSLRLSCAASGFTFSKAWMSWVRQAPGKGLEWVGRIKSVTDGETTDYAAPVKGRFTISRDDSKSTLYLQMNSLKTEDTAVYYCTSSFCCRGGSCPSHDTSYCGGQYKSYYYVNIWGKGTTVTVSS

SEQ ID NO: 116 - protein, 140 aa, synthetic construct
  REGION 1..140: note = Description of Artificial Sequence: Syntheticpolypeptide
EVQLVESGGALVKPGGSLRLSCAASGFTFSKAWMSWVRQAPGKGLEWVGRIKSVTDGETTDYAAPVKGRFTISRDDSKSTLYLQMNSLKTEDTAVYYCTTSFCCRGASCPSHDTSYCAGSYKSYYYMDVWGKGTTVTVSS

SEQ ID NO: 117 - protein, 140 aa, synthetic construct; identical to SEQ ID NO: 94
  REGION 1..140: note = Description of Artificial Sequence: Syntheticpolypeptide

SEQ ID NO: 118 - protein, 140 aa, synthetic construct
  REGION 1..140: note = Description of Artificial Sequence: Syntheticpolypeptide
EVQLVESGGALVKPGGSLRLSCAASGFTFSKAWMSWVRQAPGKGLEWVGRIKSVTDGEQTDYAAPVKGRFTISRDDSKSTLYLQMNSLKTEDTAVYYCTSSFCCRGGSCPSHDTSYCGGQYKSYYYMDVWGKGTTVTVSS

SEQ ID NO: 119 - protein, 140 aa, synthetic construct; identical to SEQ ID NO: 104
  REGION 1..140: note = Description of Artificial Sequence: Syntheticpolypeptide

SEQ ID NO: 120 - protein, 140 aa, synthetic construct
  REGION 1..140: note = Description of Artificial Sequence: Syntheticpolypeptide
EVQLVESGGALVKPGGSLRLSCAASGFTFSKAWMSWVRQAPGKGLEWVGRIKAADDGKQTDYAAPVKGRFTISRDDSKSTLYLQMNSLKTEDTAVYYCTSSFCCRGGSCPSHDTSYCGGQYKSYYYMDVWGKGTTVTVSS

SEQ ID NO: 121 - protein, 140 aa, synthetic construct
  REGION 1..140: note = Description of Artificial Sequence: Syntheticpolypeptide
EVQLVESGGALVKPGGSLRLSCAASGFTFSKAWMSWVRQAPGKGLEWVGRIKSVTDGETTDYAAPVKGRFTISRDDSKSTLYLQMNSLKTEDTAVYYCISSFCCRGNSCPSSDTSYCNGQYKSYYYMDVWGKGTTVTVSS

SEQ ID NO: 122 - protein, 140 aa, synthetic construct; identical to SEQ ID NO: 94
  REGION 1..140: note = Description of Artificial Sequence: Syntheticpolypeptide

SEQ ID NO: 123 - protein, 110 aa, synthetic construct
  REGION 1..110: note = Description of Artificial Sequence: Syntheticpolypeptide
QSVLTQPPSASGTPGQRVTISCSGSSSNIGSSSVSWYQQLPGTAPKLLIYKNNQRPSGVPDRFSGSKSGTSASLAISGLRSEDEADYYCSTWDDSLSVRVFGGGTKLTVL

SEQ ID NO: 124 - protein, 110 aa, synthetic construct
  REGION 1..110: note = Description of Artificial Sequence: Syntheticpolypeptide
QSVLTQPPSVSAAPGQKVTISCSGSSSNIGSSSVSWYQQLPGTAPKLLIYKNNQRPSGIPDRFSGSKSGTSATLGITGLQTGDEADYYCSTWDDSLSVRVFGGGTKLTVL

SEQ ID NO: 125 - protein, 110 aa, synthetic construct; identical to SEQ ID NO: 123
  REGION 1..110: note = Description of Artificial Sequence: Syntheticpolypeptide

SEQ ID NO: 126 - protein, 110 aa, synthetic construct; identical to SEQ ID NO: 123
  REGION 1..110: note = Description of Artificial Sequence: Syntheticpolypeptide

SEQ ID NO: 127 - protein, 110 aa, synthetic construct; identical to SEQ ID NO: 123
  REGION 1..110: note = Description of Artificial Sequence: Syntheticpolypeptide

SEQ ID NO: 128 - protein, 110 aa, synthetic construct; identical to SEQ ID NO: 123
  REGION 1..110: note = Description of Artificial Sequence: Syntheticpolypeptide

SEQ ID NO: 129 - protein, 110 aa, synthetic construct; identical to SEQ ID NO: 123
  REGION 1..110: note = Description of Artificial Sequence: Syntheticpolypeptide

SEQ ID NO: 130 - protein, 110 aa, synthetic construct
  REGION 1..110: note = Description of Artificial Sequence: Syntheticpolypeptide
QSVLTQPPSASGTPGQRVTISCSGSSTNIGSSSVTWYQQLPGTAPKLLIYKDNQRPLGVPDRFSGSKSGTSASLAISGLRSEDEADYYCSTWDDSLSVRVFGGGTKLTVL

SEQ ID NO: 131 - protein, 110 aa, synthetic construct
  REGION 1..110: note = Description of Artificial Sequence: Syntheticpolypeptide
QSVLTQPPSASGTPGQRVTISCSGSKSNIGSSYVSWYQQLPGTAPKLLIYMNNQRPYGVPDRFSGSKSGTSASLAISGLRSEDEADYYCATWDDQLSVRVFGGGTKLTVL

SEQ ID NO: 132 - protein, 110 aa, synthetic construct
  REGION 1..110: note = Description of Artificial Sequence: Syntheticpolypeptide
QSVLTQPPSASGTPGQRVTISCSGSKSNIGSSSVSWYQQLPGTAPKLLIYKDNQRPSGVPDRFSGSKSGTSASLAISGLRSEDEADYYCATWDNSLSIRVFGGGTKLTVL

SEQ ID NO: 133 - protein, 110 aa, synthetic construct
  REGION 1..110: note = Description of Artificial Sequence: Syntheticpolypeptide
QSVLTQPPSASGTPGQRVTISCSGASSNIGSSSVSWYQQLPGTAPKLLIYKNTQRASGVPDRFSGSKSGTSASLAISGLRSEDEADYYCSSWDDSNSVRIFGGGTKLTVL

SEQ ID NO: 134 - protein, 110 aa, synthetic construct
  REGION 1..110: note = Description of Artificial Sequence: Syntheticpolypeptide
QSVLTQPPSASGTPGQRVTISCSGSSTNIGSSTVSWYQQLPGTAPKLLIYKNNARPYGVPDRFSGSKSGTSASLAISGLRSEDEADYYCATWDDSLTVRIFGGGTKLTVL

SEQ ID NO: 135 - protein, 110 aa, synthetic construct
  REGION 1..110: note = Description of Artificial Sequence: Syntheticpolypeptide
QSVLTQPPSASGTPGQRVTISCSGASSNIGSSSVSWYQQLPGTAPKLLIYKNTQRPSGVPDRFSGSKSGTSASLAISGLRSEDEADYYCATWDDQLSVRVFGGGTKLTVL

SEQ ID NO: 136 - protein, 110 aa, synthetic construct
  REGION 1..110: note = Description of Artificial Sequence: Syntheticpolypeptide
QSVLTQPPSASGTPGQRVTISCSGSSTNIGSSSVSWYQQLPGTAPKLLIYKDNQRPSGVPDRFSGSKSGTSASLAISGLRSEDEADYYCSSWDDSNSVRIFGGGTKLTVL

SEQ ID NO: 137 - protein, 110 aa, synthetic construct
  REGION 1..110: note = Description of Artificial Sequence: Syntheticpolypeptide
QSVLTQPPSASGTPGQRVTISCSGSKSNIGSSSVYWYQQLPGTAPKLLIYKNNQRPYGVPDRFSGSKSGTSASLAISGLRSEDEADYYCSTWDDALSVRVFGGGTKLTVL

SEQ ID NO: 138 - protein, 110 aa, synthetic construct
  REGION 1..110: note = Description of Artificial Sequence: Syntheticpolypeptide
QSVLTQPPSASGTPGQRVTISCSGSSSNIGSSSVYWYQQLPGTAPKLLIYKNNQRPSGVPDRFSGSKSGTSASLAISGLRSEDEADYYCSTWDDALSVRVFGGGTKLTVL

SEQ ID NO: 139 - protein, 110 aa, synthetic construct
  REGION 1..110: note = Description of Artificial Sequence: Syntheticpolypeptide
QSVLTQPPSASGTPGQRVTISCSGSKSNIGSSYVSWYQQLPGTAPKLLIYKNNQRPYGVPDRFSGSKSGTSASLAISGLRSEDEADYYCSTWDDSLSVRVFGGGTKLTVL

SEQ ID NO: 140 - protein, 110 aa, synthetic construct; identical to SEQ ID NO: 123
  REGION 1..110: note = Description of Artificial Sequence: Syntheticpolypeptide

SEQ ID NO: 141 - protein, 110 aa, synthetic construct
  REGION 1..110: note = Description of Artificial Sequence: Syntheticpolypeptide
QSVLTQAPSASETPGQRVIISCSGSSSNIGSSSVSWYQQLPGTAPKLLIYKNNQRPSGVPDRFSGSKSGTSASLAISGLRSEDEADYYCSTWDDSLSVRVFGGGTKLTVL

SEQ ID NO: 142 - protein, 110 aa, synthetic construct; identical to SEQ ID NO: 123
  REGION 1..110: note = Description of Artificial Sequence: Syntheticpolypeptide

SEQ ID NO: 143 - protein, 110 aa, synthetic construct; identical to SEQ ID NO: 141
  REGION 1..110: note = Description of Artificial Sequence: Syntheticpolypeptide

SEQ ID NO: 144 - protein, 110 aa, synthetic construct; identical to SEQ ID NO: 141
  REGION 1..110: note = Description of Artificial Sequence: Syntheticpolypeptide

SEQ ID NO: 145 - protein, 110 aa, synthetic construct; identical to SEQ ID NO: 123
  REGION 1..110: note = Description of Artificial Sequence: Syntheticpolypeptide

SEQ ID NO: 146 - protein, 110 aa, synthetic construct; identical to SEQ ID NO: 123
  REGION 1..110: note = Description of Artificial Sequence: Syntheticpolypeptide

SEQ ID NO: 147 - protein, 110 aa, synthetic construct; identical to SEQ ID NO: 123
  REGION 1..110: note = Description of Artificial Sequence: Syntheticpolypeptide

SEQ ID NO: 148 - protein, 110 aa, synthetic construct; identical to SEQ ID NO: 123
  REGION 1..110: note = Description of Artificial Sequence: Syntheticpolypeptide

SEQ ID NO: 149 - protein, 110 aa, synthetic construct; identical to SEQ ID NO: 123
  REGION 1..110: note = Description of Artificial Sequence: Syntheticpolypeptide

SEQ ID NO: 150 - protein, 110 aa, synthetic construct; identical to SEQ ID NO: 123
  REGION 1..110: note = Description of Artificial Sequence: Syntheticpolypeptide

SEQ ID NO: 151 - protein, 110 aa, synthetic construct
  REGION 1..110: note = Description of Artificial Sequence: Syntheticpolypeptide
QSVLTQPPSASGTPGQRVTISCSGSSSNIGSSSVSWYQQLPGTAPKLLIYKNNQRPSGVPDRFSGSKSGTSASLAISGLRSEDEADYYCSTWDESLSVRVFGGGTKLTVL

SEQ ID NO: 152 - protein, 110 aa, synthetic construct; identical to SEQ ID NO: 123
  REGION 1..110: note = Description of Artificial Sequence: Syntheticpolypeptide

SEQ ID NO: 153 - protein, 110 aa, synthetic construct; identical to SEQ ID NO: 123
  REGION 1..110: note = Description of Artificial Sequence: Syntheticpolypeptide

SEQ ID NO: 154 - protein, 110 aa, synthetic construct; identical to SEQ ID NO: 151
  REGION 1..110: note = Description of Artificial Sequence: Syntheticpolypeptide

SEQ ID NO: 155 - protein, 110 aa, synthetic construct; identical to SEQ ID NO: 151
  REGION 1..110: note = Description of Artificial Sequence: Syntheticpolypeptide

SEQ ID NO: 156 - protein, 110 aa, synthetic construct; identical to SEQ ID NO: 151
  REGION 1..110: note = Description of Artificial Sequence: Syntheticpolypeptide

SEQ ID NO: 157 - protein, 110 aa, synthetic construct; identical to SEQ ID NO: 123
  REGION 1..110: note = Description of Artificial Sequence: Syntheticpolypeptide

SEQ ID NO: 158 - protein, 110 aa, synthetic construct
  REGION 1..110: note = Description of Artificial Sequence: Syntheticpolypeptide
QSVLTQPPSASGTPGQRVTISCSGSSSNIGSSSVYWYQQLPGTAPKLLIYKNNQRPSGVPDRFSGSKSGTSASLAISGLRSEDEADYYCSTWDDSLSVRVFGGGTKLTVL

SEQ ID NO: 159 - protein, 110 aa, synthetic construct; identical to SEQ ID NO: 123
  REGION 1..110: note = Description of Artificial Sequence: Syntheticpolypeptide

SEQ ID NO: 160 - protein, 110 aa, synthetic construct; identical to SEQ ID NO: 123
  REGION 1..110: note = Description of Artificial Sequence: Syntheticpolypeptide

SEQ ID NO: 161 - protein, 110 aa, synthetic construct; identical to SEQ ID NO: 123
  REGION 1..110: note = Description of Artificial Sequence: Syntheticpolypeptide

SEQ ID NO: 162 - protein, 110 aa, synthetic construct; identical to SEQ ID NO: 123
  REGION 1..110: note = Description of Artificial Sequence: Syntheticpolypeptide

SEQ ID NO: 163 - protein, 110 aa, synthetic construct
  REGION 1..110: note = Description of Artificial Sequence: Syntheticpolypeptide
QSVLTQPPSASGTPGQRVTISCSGSSSDIGSSSVSWYQQLPGTAPKLLIYKNNQRPSGVPDRFSGSKSGTSASLAISGLRSEDEADYYCSTWNDALSVRVFGGGTKLTVL

SEQ ID NO: 164 - protein, 110 aa, synthetic construct
  REGION 1..110: note = Description of Artificial Sequence: Syntheticpolypeptide
QSVLTQPPSASGTPGQRVTISCSGSSSNIGSSSVSWYQQLPGTAPKLLIYKNTQRPSGVPDRFSGSKSGTSASLAISGLRSEDEADYYCSTWDDSLNVRVFGGGTKLTVL

SEQ ID NO: 165 - protein, 110 aa, synthetic construct
  REGION 1..110: note = Description of Artificial Sequence: Syntheticpolypeptide
QSVLTQPPSASGTPGQRVTISCSGSPSNIGSSSVSWYQQLPGTAPKLLIYKNNQRPSGVPDRFSGSKSGTSASLAISGLRSEDEADYYCSTWDDALSVRVFGGGTKLTVL

SEQ ID NO: 166 - protein, 110 aa, synthetic construct; identical to SEQ ID NO: 123
  REGION 1..110: note = Description of Artificial Sequence: Syntheticpolypeptide

SEQ ID NO: 167 - protein, 110 aa, synthetic construct; identical to SEQ ID NO: 123
  REGION 1..110: note = Description of Artificial Sequence: Syntheticpolypeptide

SEQ ID NO: 168 - protein, 110 aa, synthetic construct
  REGION 1..110: note = Description of Artificial Sequence: Syntheticpolypeptide
QSVLTQPPSASGTPGQRVTISCSGSSSNIGSSSVSWYQQLPGTAPKLLIYKNSLRPQGVPDRFSGSKSGTSASLAISGLRSEDEADYYCSTWDDSLSVRVFGGGTKLTVL

SEQ ID NO: 169 - protein, 10 aa, synthetic construct
  REGION 1..10: note = Description of Artificial Sequence: Syntheticpeptide
GFTFSKAWMT

SEQ ID NO: 170 - protein, 10 aa, synthetic construct
  REGION 1..10: note = Description of Artificial Sequence: Syntheticpeptide
GFTFSKAWMT

SEQ ID NO: 171 - protein, 10 aa, synthetic construct
  REGION 1..10: note = Description of Artificial Sequence: Syntheticpeptide
GFTFSKAWMT

SEQ ID NO: 172 - protein, 10 aa, synthetic construct
  REGION 1..10: note = Description of Artificial Sequence: Syntheticpeptide
GFTFSKAWMS

SEQ ID NO: 173 - protein, 10 aa, synthetic construct
  REGION 1..10: note = Description of Artificial Sequence: Syntheticpeptide
GYTFSKAWMS

SEQ ID NO: 174 - protein, 10 aa, synthetic construct
  REGION 1..10: note = Description of Artificial Sequence: Syntheticpeptide
GFDFSKAWMS

SEQ ID NO: 175 - protein, 10 aa, synthetic construct
  REGION 1..10: note = Description of Artificial Sequence: Syntheticpeptide
GFVFSKAWMS

SEQ ID NO: 176 - protein, 10 aa, synthetic construct
  REGION 1..10: note = Description of Artificial Sequence: Syntheticpeptide
GFTYSKAWMS

SEQ ID NO: 177 - protein, 10 aa, synthetic construct
  REGION 1..10: note = Description of Artificial Sequence: Syntheticpeptide
GFTFAKAWMS

SEQ ID NO: 178 - protein, 10 aa, synthetic construct
  REGION 1..10: note = Description of Artificial Sequence: Syntheticpeptide
GFTFSNAWMS

SEQ ID NO: 179 - protein, 10 aa, synthetic construct
  REGION 1..10: note = Description of Artificial Sequence: Syntheticpeptide
GFTFSRAWMS

SEQ ID NO: 180 - protein, 10 aa, synthetic construct
  REGION 1..10: note = Description of Artificial Sequence: Syntheticpeptide
GFTFSMAWMS

SEQ ID NO: 181 - protein, 10 aa, synthetic construct
  REGION 1..10: note = Description of Artificial Sequence: Syntheticpeptide
GFTFSAAWMS

SEQ ID NO: 182 - protein, 10 aa, synthetic construct
  REGION 1..10: note = Description of Artificial Sequence: Syntheticpeptide
GFTFSHAWMS

SEQ ID NO: 183 - protein, 10 aa, synthetic construct
  REGION 1..10: note = Description of Artificial Sequence: Syntheticpeptide
GFTFSHAWMS

SEQ ID NO: 184 - protein, 10 aa, synthetic construct
  REGION 1..10: note = Description of Artificial Sequence: Syntheticpeptide
GFTFSKAYMS

SEQ ID NO: 185 - protein, 10 aa, synthetic construct
  REGION 1..10: note = Description of Artificial Sequence: Syntheticpeptide
GFTFSKAWFS

SEQ ID NO: 186 - protein, 10 aa, synthetic construct
  REGION 1..10: note = Description of Artificial Sequence: Syntheticpeptide
GFTFSKAWMS

SEQ ID NO: 187 - protein, 10 aa, synthetic construct
  REGION 1..10: note = Description of Artificial Sequence: Syntheticpeptide
GFTFSKAWMS

SEQ ID NO: 188 - protein, 10 aa, synthetic construct
  REGION 1..10: note = Description of Artificial Sequence: Syntheticpeptide
GFTFSKAWMS

SEQ ID NO: 189 - protein, 10 aa, synthetic construct
  REGION 1..10: note = Description of Artificial Sequence: Syntheticpeptide
GFTFSKAWMS

SEQ ID NO: 190 - protein, 10 aa, synthetic construct
  REGION 1..10: note = Description of Artificial Sequence: Syntheticpeptide
GFTFSKAWMS

SEQ ID NO: 191 - protein, 10 aa, synthetic construct
  REGION 1..10: note = Description of Artificial Sequence: Syntheticpeptide
GFTFSKAWMS

SEQ ID NO: 192 - protein, 10 aa, synthetic construct
  REGION 1..10: note = Description of Artificial Sequence: Syntheticpeptide
GFTFSKAWMS

SEQ ID NO: 193 - protein, 10 aa, synthetic construct
  REGION 1..10: note = Description of Artificial Sequence: Syntheticpeptide
GFTFSKAWMS

SEQ ID NO: 194 - protein, 10 aa, synthetic construct
  REGION 1..10: note = Description of Artificial Sequence: Syntheticpeptide
GFTFSKAWMS

SEQ ID NO: 195 - protein, 10 aa, synthetic construct
  REGION 1..10: note = Description of Artificial Sequence: Syntheticpeptide
GFTFSKAWMS

SEQ ID NO: 196 - protein, 10 aa, synthetic construct
  REGION 1..10: note = Description of Artificial Sequence: Syntheticpeptide
GFTFSKAWMS

SEQ ID NO: 197 - protein, 10 aa, synthetic construct
  REGION 1..10: note = Description of Artificial Sequence: Syntheticpeptide
GFTFSKAWMS

SEQ ID NO: 198 - protein, 10 aa, synthetic construct
  REGION 1..10: note = Description of Artificial Sequence: Syntheticpeptide
GFTFSKAWMS

SEQ ID NO: 199 - protein, 10 aa, synthetic construct
  REGION 1..10: note = Description of Artificial Sequence: Syntheticpeptide
GFTFSKAWMS

SEQ ID NO: 200 - protein, 10 aa, synthetic construct
  REGION 1..10: note = Description of Artificial Sequence: Syntheticpeptide
GFTFSKAWMS

SEQ ID NO: 201 - protein, 10 aa, synthetic construct
  REGION 1..10: note = Description of Artificial Sequence: Syntheticpeptide
GFTFSKAWMS

SEQ ID NO: 202 - protein, 10 aa, synthetic construct
  REGION 1..10: note = Description of Artificial Sequence: Syntheticpeptide
GFTFSKAWMS

SEQ ID NO: 203 - protein, 10 aa, synthetic construct
  REGION 1..10: note = Description of Artificial Sequence: Syntheticpeptide
GFTFSKAWMS

SEQ ID NO: 204 - protein, 10 aa, synthetic construct
  REGION 1..10: note = Description of Artificial Sequence: Syntheticpeptide
GFTFSKAWMS

SEQ ID NO: 205 - protein, 10 aa, synthetic construct
  REGION 1..10: note = Description of Artificial Sequence: Syntheticpeptide
GFTFSKAWMS

SEQ ID NO: 206 - protein, 10 aa, synthetic construct
  REGION 1..10: note = Description of Artificial Sequence: Syntheticpeptide
GFTFSKAWMS

SEQ ID NO: 207 - protein, 10 aa, synthetic construct
  REGION 1..10: note = Description of Artificial Sequence: Syntheticpeptide
GFTFSKAWMS

SEQ ID NO: 208 - protein, 10 aa, synthetic construct
  REGION 1..10: note = Description of Artificial Sequence: Syntheticpeptide
GFTFSKAWMS

SEQ ID NO: 209 - protein, 10 aa, synthetic construct
  REGION 1..10: note = Description of Artificial Sequence: Syntheticpeptide
GFTFSKAWMS

SEQ ID NO: 210 - protein, 10 aa, synthetic construct
  REGION 1..10: note = Description of Artificial Sequence: Syntheticpeptide
GFTFSKAWMS

SEQ ID NO: 211 - protein, 10 aa, synthetic construct
  REGION 1..10: note = Description of Artificial Sequence: Syntheticpeptide
GFTFSKAWMS

SEQ ID NO: 212 - protein, 10 aa, synthetic construct
  REGION 1..10: note = Description of Artificial Sequence: Syntheticpeptide
GFTFSKAWMS

SEQ ID NO: 213 - protein, 10 aa, synthetic construct
  REGION 1..10: note = Description of Artificial Sequence: Syntheticpeptide
GFTFSKAWMS

SEQ ID NO: 214 - protein, 10 aa, synthetic construct
  REGION 1..10: note = Description of Artificial Sequence: Syntheticpeptide
GFTFSKAWMS

SEQ ID NO: 215 - protein, 10 aa, synthetic construct
  REGION 1..10: note = Description of Artificial Sequence: Syntheticpeptide
GFTFSKAWMS

SEQ ID NO: 216 - protein, 10 aa, synthetic construct
  REGION 1..10: note = Description of Artificial Sequence: Syntheticpeptide
GFTFSKAWMS

SEQ ID NO: 217 - protein, 10 aa, synthetic construct
  REGION 1..10: note = Description of Artificial Sequence: Syntheticpeptide
GFTFSKAWMS

SEQ ID NO: 218 - protein, 10 aa, synthetic construct
  REGION 1..10: note = Description of Artificial Sequence: Syntheticpeptide
GFTFSKAWMS

SEQ ID NO: 219 - protein, 10 aa, synthetic construct
  REGION 1..10: note = Description of Artificial Sequence: Syntheticpeptide
GFTFSKAWMS

SEQ ID NO: 220 - protein, 10 aa, synthetic construct
  REGION 1..10: note = Description of Artificial Sequence: Syntheticpeptide
GFTFSKAWMS

SEQ ID NO: 221 - protein, 10 aa, synthetic construct
  REGION 1..10: note = Description of Artificial Sequence: Syntheticpeptide
GFTFSKAWMS

SEQ ID NO: 222 - protein, 10 aa, synthetic construct
  REGION 1..10: note = Description of Artificial Sequence: Syntheticpeptide
GFTFSKAWMS

SEQ ID NO: 223 - protein, 10 aa, synthetic construct
  REGION 1..10: note = Description of Artificial Sequence: Syntheticpeptide
GFTFSKAWMS

SEQ ID NO: 224 - protein, 10 aa, synthetic construct
  REGION 1..10: note = Description of Artificial Sequence: Syntheticpeptide
GFTFSKAWMS

SEQ ID NO: 225 - protein, 10 aa, synthetic construct
  REGION 1..10: note = Description of Artificial Sequence: Syntheticpeptide
GFTFSKAWMS

SEQ ID NO: 226 - protein, 10 aa, synthetic construct
  REGION 1..10: note = Description of Artificial Sequence: Syntheticpeptide
GFTFSKAWMS

SEQ ID NO: 227 - protein, 10 aa, synthetic construct
  REGION 1..10: note = Description of Artificial Sequence: Syntheticpeptide
GFTFSKAWMS

SEQ ID NO: 228 - protein, 10 aa, synthetic construct
  REGION 1..10: note = Description of Artificial Sequence: Syntheticpeptide
GFTFSKAWMS

SEQ ID NO: 229 - protein, 10 aa, synthetic construct
  REGION 1..10: note = Description of Artificial Sequence: Syntheticpeptide
GFTFSKAWMS

SEQ ID NO: 230 - protein, 10 aa, synthetic construct
  REGION 1..10: note = Description of Artificial Sequence: Syntheticpeptide
GFTFSKAWMS

SEQ ID NO: 231 - protein, 10 aa, synthetic construct
  REGION 1..10: note = Description of Artificial Sequence: Syntheticpeptide
GFTFSKAWMS

SEQ ID NO: 232 - protein, 10 aa, synthetic construct
  REGION 1..10: note = Description of Artificial Sequence: Syntheticpeptide
GFTFSKAWMS

SEQ ID NO: 233 - protein, 10 aa, synthetic construct
  REGION 1..10: note = Description of Artificial Sequence: Syntheticpeptide
GFTFSKAWMS

SEQ ID NO: 234 - protein, 10 aa, synthetic construct
  REGION 1..10: note = Description of Artificial Sequence: Syntheticpeptide
GFTFSKAWMS

SEQ ID NO: 235 - protein, 10 aa, synthetic construct
  REGION 1..10: note = Description of Artificial Sequence: Syntheticpeptide
GFTFSKAWMS

SEQ ID NO: 236 - protein, 10 aa, synthetic construct
  REGION 1..10: note = Description of Artificial Sequence: Syntheticpeptide
GFTFSKAWMS

SEQ ID NO: 237 - protein, 10 aa, synthetic construct
  REGION 1..10: note = Description of Artificial Sequence: Syntheticpeptide
GFTFSKAWMS

SEQ ID NO: 238 - protein, 10 aa, synthetic construct
  REGION 1..10: note = Description of Artificial Sequence: Syntheticpeptide
GFTFSKAWMS

SEQ ID NO: 239 - protein, 10 aa, synthetic construct
  REGION 1..10: note = Description of Artificial Sequence: Syntheticpeptide
GFTFSKAWMS

SEQ ID NO: 240 - protein, 10 aa, synthetic construct
  REGION 1..10: note = Description of Artificial Sequence: Syntheticpeptide
GFTFSKAWMS

SEQ ID NO: 241 - protein, 10 aa, synthetic construct
  REGION 1..10: note = Description of Artificial Sequence: Syntheticpeptide
GFTFSKAWMS

SEQ ID NO: 242 - protein, 10 aa, synthetic construct
  REGION 1..10: note = Description of Artificial Sequence: Syntheticpeptide
GFTFSKAWMS

SEQ ID NO: 243 - protein, 10 aa, synthetic construct
  REGION 1..10: note = Description of Artificial Sequence: Syntheticpeptide
GFTFSKAWMS

SEQ ID NO: 244 - protein, 10 aa, synthetic construct
  REGION 1..10: note = Description of Artificial Sequence: Syntheticpeptide
GFTFSKAWMS

SEQ ID NO: 245 - protein, 10 aa, synthetic construct
  REGION 1..10: note = Description of Artificial Sequence: Syntheticpeptide
GFTFSKAWMS

SEQ ID NO: 246 - protein, 10 aa, synthetic construct
  REGION 1..10: note = Description of Artificial Sequence: Syntheticpeptide
GFTFSKAWMS

SEQ ID NO: 247 - protein, 10 aa, synthetic construct
  REGION 1..10: note = Description of Artificial Sequence: Syntheticpeptide
GFTFSKAWMS

SEQ ID NO: 248 - protein, 10 aa, synthetic construct
  REGION 1..10: note = Description of Artificial Sequence: Syntheticpeptide
GFTFSKAWMS

SEQ ID NO: 249 - protein, 10 aa, synthetic construct
  REGION 1..10: note = Description of Artificial Sequence: Syntheticpeptide
GFTFSKAWMS

SEQ ID NO: 250 - protein, 10 aa, synthetic construct
  REGION 1..10: note = Description of Artificial Sequence: Syntheticpeptide
GFTFSKAWMS

SEQ ID NO: 251 - protein, 10 aa, synthetic construct
  REGION 1..10: note = Description of Artificial Sequence: Syntheticpeptide
GFTFSKAWMS

SEQ ID NO: 252 - protein, 10 aa, synthetic construct
  REGION 1..10: note = Description of Artificial Sequence: Syntheticpeptide
GFTFSKAWMS

SEQ ID NO: 253 - protein, 10 aa, synthetic construct
  REGION 1..10: note = Description of Artificial Sequence: Syntheticpeptide
GFTFSKAWMS

SEQ ID NO: 254 - protein, 10 aa, synthetic construct
  REGION 1..10: note = Description of Artificial Sequence: Syntheticpeptide
GFTFSKAWMS

SEQ ID NO: 255 - protein, 10 aa, synthetic construct
  REGION 1..10: note = Description of Artificial Sequence: Syntheticpeptide
GFDFSKAWMS

SEQ ID NO: 256 - protein, 10 aa, synthetic construct
  REGION 1..10: note = Description of Artificial Sequence: Syntheticpeptide
GFTFAKAWMS

SEQ ID NO: 257 - protein, 10 aa, synthetic construct
  REGION 1..10: note = Description of Artificial Sequence: Syntheticpeptide
GFDASKAWFT

SEQ ID NO: 258 - protein, 10 aa, synthetic construct
  REGION 1..10: note = Description of Artificial Sequence: Syntheticpeptide
GFTFSKAWMS

SEQ ID NO: 259 - protein, 10 aa, synthetic construct
  REGION 1..10: note = Description of Artificial Sequence: Syntheticpeptide
GFTFSKAWMS

SEQ ID NO: 260 - protein, 10 aa, synthetic construct
  REGION 1..10: note = Description of Artificial Sequence: Syntheticpeptide
GFTFSKAWMS

SEQ ID NO: 261 - protein, 10 aa, synthetic construct
  REGION 1..10: note = Description of Artificial Sequence: Syntheticpeptide
GFTFSKAWMS

SEQ ID NO: 262 - protein, 10 aa, synthetic construct
  REGION 1..10: note = Description of Artificial Sequence: Syntheticpeptide
GFTFSKAWMS

SEQ ID NO: 263 - protein, 10 aa, synthetic construct
  REGION 1..10: note = Description of Artificial Sequence: Syntheticpeptide
GFTFSKAWMS

SEQ ID NO: 264 - protein, 10 aa, synthetic construct
  REGION 1..10: note = Description of Artificial Sequence: Syntheticpeptide
GFTFSKAWMS

SEQ ID NO: 265 - protein, 10 aa, synthetic construct
  REGION 1..10: note = Description of Artificial Sequence: Syntheticpeptide
GFTFSKAWMS

SEQ ID NO: 266 - protein, 10 aa, synthetic construct
  REGION 1..10: note = Description of Artificial Sequence: Syntheticpeptide
GFTFSKAWMS

SEQ ID NO: 267 - protein, 10 aa, synthetic construct
  REGION 1..10: note = Description of Artificial Sequence: Syntheticpeptide
GFTFSKAWMS

SEQ ID NO: 268 - protein, 10 aa, synthetic construct
  REGION 1..10: note = Description of Artificial Sequence: Syntheticpeptide
GFTFSKAWMS

SEQ ID NO: 269 - protein, 10 aa, synthetic construct
  REGION 1..10: note = Description of Artificial Sequence: Syntheticpeptide
GFTFSKAWMS

SEQ ID NO: 270 - protein, 10 aa, synthetic construct
  REGION 1..10: note = Description of Artificial Sequence: Syntheticpeptide
GFTFSKAWMS

SEQ ID NO: 271 - protein, 10 aa, synthetic construct
  REGION 1..10: note = Description of Artificial Sequence: Syntheticpeptide
GFTFSKAWMS

SEQ ID NO: 272 - protein, 10 aa, synthetic construct
  REGION 1..10: note = Description of Artificial Sequence: Syntheticpeptide
GFTFSKAWMS

SEQ ID NO: 273 - protein, 10 aa, synthetic construct
  REGION 1..10: note = Description of Artificial Sequence: Syntheticpeptide
GFTFSKAWMS

SEQ ID NO: 274 - protein, 10 aa, synthetic construct
  REGION 1..10: note = Description of Artificial Sequence: Syntheticpeptide
GFTFSKAWMS

SEQ ID NO: 275 - protein, 10 aa, synthetic construct
  REGION 1..10: note = Description of Artificial Sequence: Syntheticpeptide
GFTFSKAWMS

SEQ ID NO: 276 - protein, 10 aa, synthetic construct
  REGION 1..10: note = Description of Artificial Sequence: Syntheticpeptide
GFTFSKAWMS

SEQ ID NO: 277 - protein, 10 aa, synthetic construct
  REGION 1..10: note = Description of Artificial Sequence: Syntheticpeptide
GFTFSKAWMS

SEQ ID NO: 278 - protein, 10 aa, synthetic construct
  REGION 1..10: note = Description of Artificial Sequence: Syntheticpeptide
GFTFSKAWMS

SEQ ID NO: 279 - protein, 10 aa, synthetic construct
  REGION 1..10: note = Description of Artificial Sequence: Syntheticpeptide
GFTFSKAWMS

SEQ ID NO: 280 - protein, 10 aa, synthetic construct
  REGION 1..10: note = Description of Artificial Sequence: Syntheticpeptide
GFTFSKAWMS

SEQ ID NO: 281 - protein, 10 aa, synthetic construct
  REGION 1..10: note = Description of Artificial Sequence: Syntheticpeptide
GFTFSKAWMS

SEQ ID NO: 282 - protein, 10 aa, synthetic construct
  REGION 1..10: note = Description of Artificial Sequence: Syntheticpeptide
GFTFSKAWMS

SEQ ID NO: 283 - protein, 10 aa, synthetic construct
  REGION 1..10: note = Description of Artificial Sequence: Syntheticpeptide
GFTFSKAWMS

SEQ ID NO: 284 - protein, 10 aa, synthetic construct
  REGION 1..10: note = Description of Artificial Sequence: Syntheticpeptide
GFTFSKAWMS

SEQ ID NO: 285 - protein, 10 aa, synthetic construct
  REGION 1..10: note = Description of Artificial Sequence: Syntheticpeptide
GFTFSKAWMS

SEQ ID NO: 286 - protein, 10 aa, synthetic construct
  REGION 1..10: note = Description of Artificial Sequence: Syntheticpeptide
GFTFSKAWMS

SEQ ID NO: 287 - protein, 10 aa, synthetic construct
  REGION 1..10: note = Description of Artificial Sequence: Syntheticpeptide
GFTFSKAWMS

SEQ ID NO: 288 - protein, 10 aa, synthetic construct
  REGION 1..10: note = Description of Artificial Sequence: Syntheticpeptide
GFTFSKAWMS

SEQ ID NO: 289 - protein, 10 aa, synthetic construct
  REGION 1..10: note = Description of Artificial Sequence: Syntheticpeptide
GFTFSKAWMS

SEQ ID NO: 290 - protein, 10 aa, synthetic construct
  REGION 1..10: note = Description of Artificial Sequence: Syntheticpeptide
GFTFSKAWMS

SEQ ID NO: 291 - protein, 10 aa, synthetic construct
  REGION 1..10: note = Description of Artificial Sequence: Syntheticpeptide
GFTFSKAWMS

SEQ ID NO: 292 - protein, 10 aa, synthetic construct
  REGION 1..10: note = Description of Artificial Sequence: Syntheticpeptide
GFTFSKAWMS

SEQ ID NO: 293 - protein, 10 aa, synthetic construct
  REGION 1..10: note = Description of Artificial Sequence: Syntheticpeptide
GFTFSKAWMS

SEQ ID NO: 294 - protein, 10 aa, synthetic construct
  REGION 1..10: note = Description of Artificial Sequence: Syntheticpeptide
GFTFSKAWMS

SEQ ID NO: 295 - protein, 10 aa, synthetic construct
  REGION 1..10: note = Description of Artificial Sequence: Syntheticpeptide
GFTFSKAWMS

SEQ ID NO: 296 - protein, 10 aa, synthetic construct
  REGION 1..10: note = Description of Artificial Sequence: Syntheticpeptide
GFTFSKAWMS

SEQ ID NO: 297 - protein, 10 aa, synthetic construct
  REGION 1..10: note = Description of Artificial Sequence: Syntheticpeptide
GFTFSKAWMS

SEQ ID NO: 298 - protein, 10 aa, synthetic construct
  REGION 1..10: note = Description of Artificial Sequence: Syntheticpeptide
GFTFSKAWMS

SEQ ID NO: 299 - protein, 10 aa, synthetic construct
  REGION 1..10: note = Description of Artificial Sequence: Syntheticpeptide
GFTFSKAWMS

SEQ ID NO: 300 - protein, 10 aa, synthetic construct
  REGION 1..10: note = Description of Artificial Sequence: Syntheticpeptide
GFTFSKAWMS

SEQ ID NO: 301 - protein, 10 aa, synthetic construct
  REGION 1..10: note = Description of Artificial Sequence: Syntheticpeptide
GFTFSKAWMS

SEQ ID NO: 302 - protein, 10 aa, synthetic construct
  REGION 1..10: note = Description of Artificial Sequence: Syntheticpeptide
GFTFSKAWMS

SEQ ID NO: 303 - protein, 10 aa, synthetic construct
  REGION 1..10: note = Description of Artificial Sequence: Syntheticpeptide
GFTFSKAWMS

SEQ ID NO: 304 - protein, 10 aa, synthetic construct
  REGION 1..10: note = Description of Artificial Sequence: Syntheticpeptide
GFTFSKAWMS

SEQ ID NO: 305 - protein, 10 aa, synthetic construct
  REGION 1..10: note = Description of Artificial Sequence: Syntheticpeptide
GFTFSKAWMS

SEQ ID NO: 306 - protein, 10 aa, synthetic construct
  REGION 1..10: note = Description of Artificial Sequence: Syntheticpeptide
GFTFSKAWMS

SEQ ID NO: 307 - protein, 10 aa, synthetic construct
  REGION 1..10: note = Description of Artificial Sequence: Syntheticpeptide
GFTFSKAWMS

SEQ ID NO: 308 - protein, 10 aa, synthetic construct
  REGION 1..10: note = Description of Artificial Sequence: Syntheticpeptide
GFTFSKAWMS

SEQ ID NO: 309 - protein, 10 aa, synthetic construct
  REGION 1..10: note = Description of Artificial Sequence: Syntheticpeptide
GFTFSKAWYS

SEQ ID NO: 310 - protein, 10 aa, synthetic construct
  REGION 1..10: note = Description of Artificial Sequence: Syntheticpeptide
GFTFSKAWMS

SEQ ID NO: 311 - protein, 10 aa, synthetic construct
  REGION 1..10: note = Description of Artificial Sequence: Syntheticpeptide
GFTFSKAWMS

SEQ ID NO: 312 - protein, 10 aa, synthetic construct
  REGION 1..10: note = Description of Artificial Sequence: Syntheticpeptide
GFTFSKAWMS

SEQ ID NO: 313 - protein, 10 aa, synthetic construct
  REGION 1..10: note = Description of Artificial Sequence: Syntheticpeptide
GFTFSKAWMS

SEQ ID NO: 314 - protein, 10 aa, synthetic construct
  REGION 1..10: note = Description of Artificial Sequence: Syntheticpeptide
GFTFSKAWMS

SEQ ID NO: 315 - protein, 10 aa, synthetic construct
  REGION 1..10: note = Description of Artificial Sequence: Syntheticpeptide
GFTFSKAWMS

SEQ ID NO: 316 - protein, 10 aa, synthetic construct
  REGION 1..10: note = Description of Artificial Sequence: Syntheticpeptide
GFTFSKAWMS

SEQ ID NO: 317 - protein, 10 aa, synthetic construct
  REGION 1..10: note = Description of Artificial Sequence: Syntheticpeptide
GFTFSKAWMS

SEQ ID NO: 318 - protein, 10 aa, synthetic construct
  REGION 1..10: note = Description of Artificial Sequence: Syntheticpeptide
GFTFSKAWMS

SEQ ID NO: 319 - protein, 10 aa, synthetic construct
  REGION 1..10: note = Description of Artificial Sequence: Syntheticpeptide
GFTFSKAWMS

SEQ ID NO: 320 - protein, 10 aa, synthetic construct
  REGION 1..10: note = Description of Artificial Sequence: Syntheticpeptide
GFTFSKAWMS

SEQ ID NO: 321 - protein, 10 aa, synthetic construct
  REGION 1..10: note = Description of Artificial Sequence: Syntheticpeptide
GFTFSKAWMS

SEQ ID NO: 322 - protein, 10 aa, synthetic construct
  REGION 1..10: note = Description of Artificial Sequence: Syntheticpeptide
GFTFSKAWMS

SEQ ID NO: 323 - protein, 10 aa, synthetic construct
  REGION 1..10: note = Description of Artificial Sequence: Syntheticpeptide
GFTFSKAWMS

SEQ ID NO: 324 - protein, 10 aa, synthetic construct
  REGION 1..10: note = Description of Artificial Sequence: Syntheticpeptide
GFTFSKAWMS

SEQ ID NO: 325 - protein, 10 aa, synthetic construct
  REGION 1..10: note = Description of Artificial Sequence: Syntheticpeptide
GFTFSKAWMS

SEQ ID NO: 326 - protein, 10 aa, synthetic construct
  REGION 1..10: note = Description of Artificial Sequence: Syntheticpeptide
GFTFSKAWMS

SEQ ID NO: 327 - protein, 10 aa, synthetic construct
  REGION 1..10: note = Description of Artificial Sequence: Syntheticpeptide
GFTFSKAWMS

SEQ ID NO: 328 - protein, 10 aa, synthetic construct
  REGION 1..10: note = Description of Artificial Sequence: Syntheticpeptide
GFTFSKAWMS

SEQ ID NO: 329 - protein, 10 aa, synthetic construct
  REGION 1..10: note = Description of Artificial Sequence: Syntheticpeptide
GFTFSKAWMS

SEQ ID NO: 330 - protein, 10 aa, synthetic construct
  REGION 1..10: note = Description of Artificial Sequence: Syntheticpeptide
GFTFSKAWMS

SEQ ID NO: 331 - protein, 10 aa, synthetic construct
  REGION 1..10: note = Description of Artificial Sequence: Syntheticpeptide
GFTFSKAWMS

SEQ ID NO: 332 - protein, 10 aa, synthetic construct
  REGION 1..10: note = Description of Artificial Sequence: Syntheticpeptide
GFTFSKAWMS

SEQ ID NO: 333 - protein, 10 aa, synthetic construct
  REGION 1..10: note = Description of Artificial Sequence: Syntheticpeptide
GFTFSKAWMS

SEQ ID NO: 334 - protein, 10 aa, synthetic construct
  REGION 1..10: note = Description of Artificial Sequence: Syntheticpeptide
GFTFSKAWMS

SEQ ID NO: 335 - protein, 10 aa, synthetic construct
  REGION 1..10: note = Description of Artificial Sequence: Syntheticpeptide
GFTFSKAWMS

SEQ ID NO: 336 - protein, 10 aa, synthetic construct
  REGION 1..10: note = Description of Artificial Sequence: Syntheticpeptide
GFTFSKAWMS

SEQ ID NO: 337 - protein, 10 aa, synthetic construct
  REGION 1..10: note = Description of Artificial Sequence: Syntheticpeptide
GFTFSKAWMS

SEQ ID NO: 338 - protein, 10 aa, synthetic construct
  REGION 1..10: note = Description of Artificial Sequence: Syntheticpeptide
GFTFSKAWMS

SEQ ID NO: 339 - protein, 10 aa, synthetic construct
  REGION 1..10: note = Description of Artificial Sequence: Syntheticpeptide
GFTFSKAWMS

SEQ ID NO: 340 - protein, 10 aa, synthetic construct
  REGION 1..10: note = Description of Artificial Sequence: Syntheticpeptide
GFTFSKAWMS

SEQ ID NO: 341 - protein, 10 aa, synthetic construct
  REGION 1..10: note = Description of Artificial Sequence: Syntheticpeptide
GFTFSKAWMS

SEQ ID NO: 342 - protein, 10 aa, synthetic construct
  REGION 1..10: note = Description of Artificial Sequence: Syntheticpeptide
GFTFSKAWMS

SEQ ID NO: 343 - protein, 10 aa, synthetic construct
  REGION 1..10: note = Description of Artificial Sequence: Syntheticpeptide
GFTFSKAWMS

SEQ ID NO: 344 - protein, 10 aa, synthetic construct
  REGION 1..10: note = Description of Artificial Sequence: Syntheticpeptide
GFTFSKAWMS

SEQ ID NO: 345 - protein, 10 aa, synthetic construct
  REGION 1..10: note = Description of Artificial Sequence: Syntheticpeptide
GFTFSKAWMS

SEQ ID NO: 346 - protein, 10 aa, synthetic construct
  REGION 1..10: note = Description of Artificial Sequence: Syntheticpeptide
GFTFAKAWMS

SEQ ID NO: 347 - protein, 10 aa, synthetic construct
  REGION 1..10: note = Description of Artificial Sequence: Syntheticpeptide
GFTYAKAWMS

SEQ ID NO: 348 - protein, 10 aa, synthetic construct
  REGION 1..10: note = Description of Artificial Sequence: Syntheticpeptide
GFDASKAWFT

SEQ ID NO: 349 - protein, 10 aa, synthetic construct
  REGION 1..10: note = Description of Artificial Sequence: Syntheticpeptide
GFDASKAWFT

SEQ ID NO: 350 - protein, 10 aa, synthetic construct
  REGION 1..10: note = Description of Artificial Sequence: Syntheticpeptide
GFDASKAWFT

SEQ ID NO: 351 - protein, 10 aa, synthetic construct
  REGION 1..10: note = Description of Artificial Sequence: Syntheticpeptide
GFDASKAWFT

SEQ ID NO: 352 - protein, 10 aa, synthetic construct
  REGION 1..10: note = Description of Artificial Sequence: Syntheticpeptide
GFTFSKAWMS

SEQ ID NO: 353 - protein, 10 aa, synthetic construct
  REGION 1..10: note = Description of Artificial Sequence: Syntheticpeptide
GFTFSKAWMS

SEQ ID NO: 354 - protein, 10 aa, synthetic construct
  REGION 1..10: note = Description of Artificial Sequence: Syntheticpeptide
GFTFSKAWMS

SEQ ID NO: 355 - protein, 10 aa, synthetic construct
  REGION 1..10: note = Description of Artificial Sequence: Syntheticpeptide
GFTFSKAWMS

SEQ ID NO: 356 - protein, 10 aa, synthetic construct
  REGION 1..10: note = Description of Artificial Sequence: Syntheticpeptide
GFTFSKAWMS

SEQ ID NO: 357 - protein, 10 aa, synthetic construct
  REGION 1..10: note = Description of Artificial Sequence: Syntheticpeptide
GFTFSKAWMS

SEQ ID NO: 358 - protein, 10 aa, synthetic construct
  REGION 1..10: note = Description of Artificial Sequence: Syntheticpeptide
GFVYSKAWMS

SEQ ID NO: 359 - protein, 10 aa, synthetic construct
  REGION 1..10: note = Description of Artificial Sequence: Syntheticpeptide
GFVFSKAWMS

SEQ ID NO: 360 - protein, 10 aa, synthetic construct
  REGION 1..10: note = Description of Artificial Sequence: Syntheticpeptide
GFTFAKAWMS

SEQ ID NO: 361 - protein, 10 aa, synthetic construct
  REGION 1..10: note = Description of Artificial Sequence: Syntheticpeptide
GFTYAKAWFT

SEQ ID NO: 362 - protein, 10 aa, synthetic construct
  REGION 1..10: note = Description of Artificial Sequence: Syntheticpeptide
GFTFSKAWMS

SEQ ID NO: 363 - protein, 19 aa, synthetic construct
  REGION 1..19: note = Description of Artificial Sequence: Syntheticpeptide
RIKSVTEGETTDYAAPVKG

SEQ ID NO: 364 - protein, 19 aa, synthetic construct
  REGION 1..19: note = Description of Artificial Sequence: Syntheticpeptide
RIKSVTEGETTDYAAPVKG

SEQ ID NO: 365 - protein, 19 aa, synthetic construct
  REGION 1..19: note = Description of Artificial Sequence: Syntheticpeptide
RIKSVTDGETTDYAAPVKG

SEQ ID NO: 366 - protein, 19 aa, synthetic construct
  REGION 1..19: note = Description of Artificial Sequence: Syntheticpeptide
RIKSVTDGETTDYAAPVKG

SEQ ID NO: 367 - protein, 19 aa, synthetic construct
  REGION 1..19: note = Description of Artificial Sequence: Syntheticpeptide
RIKSVTDGETTDYAAPVKG

SEQ ID NO: 368 - protein, 19 aa, synthetic construct
  REGION 1..19: note = Description of Artificial Sequence: Syntheticpeptide
RIKSVTDGETTDYAAPVKG

SEQ ID NO: 369 - protein, 19 aa, synthetic construct
  REGION 1..19: note = Description of Artificial Sequence: Syntheticpeptide
RIKSVTDGETTDYAAPVKG

SEQ ID NO: 370 - protein, 19 aa, synthetic construct
  REGION 1..19: note = Description of Artificial Sequence: Syntheticpeptide
RIKSVTDGETTDYAAPVKG

SEQ ID NO: 371 - protein, 19 aa, synthetic construct
  REGION 1..19: note = Description of Artificial Sequence: Syntheticpeptide
RIKSVTDGETTDYAAPVKG

SEQ ID NO: 372 - protein, 19 aa, synthetic construct
  REGION 1..19: note = Description of Artificial Sequence: Syntheticpeptide
RIKSVTDGETTDYAAPVKG

SEQ ID NO: 373 - protein, 19 aa, synthetic construct
  REGION 1..19: note = Description of Artificial Sequence: Syntheticpeptide
RIKSVTDGETTDYAAPVKG

SEQ ID NO: 374 - protein, 19 aa, synthetic construct
  REGION 1..19: note = Description of Artificial Sequence: Syntheticpeptide
RIKSVTDGETTDYAAPVKG

SEQ ID NO: 375 - protein, 19 aa, synthetic construct
  REGION 1..19: note = Description of Artificial Sequence: Syntheticpeptide
RIKSVTDGETTDYAAPVKG

SEQ ID NO: 376 - protein, 19 aa, synthetic construct
  REGION 1..19: note = Description of Artificial Sequence: Syntheticpeptide
RIKSVTDGETTDYAAPVKG

SEQ ID NO: 377 - protein, 19 aa, synthetic construct
  REGION 1..19: note = Description of Artificial Sequence: Syntheticpeptide
RIKSVTDGETTDYAAPVKG

SEQ ID NO: 378 - protein, 19 aa, synthetic construct
  REGION 1..19: note = Description of Artificial Sequence: Syntheticpeptide
RIKSVTDGETTDYAAPVKG

SEQ ID NO: 379 - protein, 19 aa, synthetic construct
  REGION 1..19: note = Description of Artificial Sequence: Syntheticpeptide
RIKSVTDGETTDYAAPVKG

SEQ ID NO: 380 - protein, 19 aa, synthetic construct
  REGION 1..19: note = Description of Artificial Sequence: Syntheticpeptide
RIQSVTDGETTDYAAPVKG

SEQ ID NO: 381 - protein, 19 aa, synthetic construct
  REGION 1..19: note = Description of Artificial Sequence: Syntheticpeptide
RIKAVTDGETTDYAAPVKG

SEQ ID NO: 382 - protein, 19 aa, synthetic construct
  REGION 1..19: note = Description of Artificial Sequence: Syntheticpeptide
RIKSATDGETTDYAAPVKG

SEQ ID NO: 383 - protein, 19 aa, synthetic construct
  REGION 1..19: note = Description of Artificial Sequence: Syntheticpeptide
RIKSNTDGETTDYAAPVKG

SEQ ID NO: 384 - protein, 19 aa, synthetic construct
  REGION 1..19: note = Description of Artificial Sequence: Syntheticpeptide
RIKSVHDGETTDYAAPVKG

SEQ ID NO: 385 - protein, 19 aa, synthetic construct
  REGION 1..19: note = Description of Artificial Sequence: Syntheticpeptide
RIKSVDDGETTDYAAPVKG

SEQ ID NO: 386 - protein, 19 aa, synthetic construct
  REGION 1..19: note = Description of Artificial Sequence: Syntheticpeptide
RIKSVQDGETTDYAAPVKG

SEQ ID NO: 387 - protein, 19 aa, synthetic construct
  REGION 1..19: note = Description of Artificial Sequence: Syntheticpeptide
RIKSVTNGETTDYAAPVKG

SEQ ID NO: 388 - protein, 19 aa, synthetic construct
  REGION 1..19: note = Description of Artificial Sequence: Syntheticpeptide
RIKSVTDAETTDYAAPVKG

SEQ ID NO: 389 - protein, 19 aa, synthetic construct
  REGION 1..19: note = Description of Artificial Sequence: Syntheticpeptide
RIKSVTDGQTTDYAAPVKG

SEQ ID NO: 390 - protein, 19 aa, synthetic construct
  REGION 1..19: note = Description of Artificial Sequence: Syntheticpeptide
RIKSVTDGHTTDYAAPVKG

SEQ ID NO: 391 - protein, 19 aa, synthetic construct
  REGION 1..19: note = Description of Artificial Sequence: Syntheticpeptide
RIKSVTDGEQTDYAAPVKG

SEQ ID NO: 392 - protein, 19 aa, synthetic construct
  REGION 1..19: note = Description of Artificial Sequence: Syntheticpeptide
RIKSVTDGEATDYAAPVKG

SEQ ID NO: 393 - protein, 19 aa, synthetic construct
  REGION 1..19: note = Description of Artificial Sequence: Syntheticpeptide
RIKSVTDGETTDYASPVKG

SEQ ID NO: 394 - protein, 19 aa, synthetic construct
  REGION 1..19: note = Description of Artificial Sequence: Syntheticpeptide
RIKSVTDGETTDYAAPVQG

SEQ ID NO: 395 - protein, 19 aa, synthetic construct
  REGION 1..19: note = Description of Artificial Sequence: Syntheticpeptide
RIKSVTDGETTDYAAPVKG

SEQ ID NO: 396 - protein, 19 aa, synthetic construct
  REGION 1..19: note = Description of Artificial Sequence: Syntheticpeptide
RIKSVTDGETTDYAAPVKG

SEQ ID NO: 397 - protein, 19 aa, synthetic construct
  REGION 1..19: note = Description of Artificial Sequence: Syntheticpeptide
RIKSVTDGETTDYAAPVKG

SEQ ID NO: 398 - protein, 19 aa, synthetic construct
  REGION 1..19: note = Description of Artificial Sequence: Syntheticpeptide
RIKSVTDGETTDYAAPVKG

SEQ ID NO: 399 - protein, 19 aa, synthetic construct
  REGION 1..19: note = Description of Artificial Sequence: Syntheticpeptide
RIKSVTDGETTDYAAPVKG

SEQ ID NO: 400 - protein, 19 aa, synthetic construct
  REGION 1..19: note = Description of Artificial Sequence: Syntheticpeptide
RIKSVTDGETTDYAAPVKG

SEQ ID NO: 401 - protein, 19 aa, synthetic construct
  REGION 1..19: note = Description of Artificial Sequence: Syntheticpeptide
RIKSVTDGETTDYAAPVKG

SEQ ID NO: 402 - protein, 19 aa, synthetic construct
  REGION 1..19: note = Description of Artificial Sequence: Syntheticpeptide
RIKSVTDGETTDYAAPVKG

SEQ ID NO: 403 - protein, 19 aa, synthetic construct
  REGION 1..19: note = Description of Artificial Sequence: Syntheticpeptide
RIKSVTDGETTDYAAPVKG

SEQ ID NO: 404 - protein, 19 aa, synthetic construct
  REGION 1..19: note = Description of Artificial Sequence: Syntheticpeptide
RIKSVTDGETTDYAAPVKG

SEQ ID NO: 405 - protein, 19 aa, synthetic construct
  REGION 1..19: note = Description of Artificial Sequence: Syntheticpeptide
RIKSVTDGETTDYAAPVKG

SEQ ID NO: 406 - protein, 19 aa, synthetic construct
  REGION 1..19: note = Description of Artificial Sequence: Syntheticpeptide
RIKSVTDGETTDYAAPVKG

SEQ ID NO: 407 - protein, 19 aa, synthetic construct
  REGION 1..19: note = Description of Artificial Sequence: Syntheticpeptide
RIKSVTDGETTDYAAPVKG

SEQ ID NO: 408 - protein, 19 aa, synthetic construct
  REGION 1..19: note = Description of Artificial Sequence: Syntheticpeptide
RIKSVTDGETTDYAAPVKG

SEQ ID NO: 409 - protein, 19 aa, synthetic construct
  REGION 1..19: note = Description of Artificial Sequence: Syntheticpeptide
RIKSVTDGETTDYAAPVKG

SEQ ID NO: 410 - protein, 19 aa, synthetic construct
  REGION 1..19: note = Description of Artificial Sequence: Syntheticpeptide
RIKSVTDGETTDYAAPVKG

SEQ ID NO: 411 - protein, 19 aa, synthetic construct
  REGION 1..19: note = Description of Artificial Sequence: Syntheticpeptide
RIKSVTDGETTDYAAPVKG

SEQ ID NO: 412 - protein, 19 aa, synthetic construct
  REGION 1..19: note = Description of Artificial Sequence: Syntheticpeptide
RIKSVTDGETTDYAAPVKG

SEQ ID NO: 413 - protein, 19 aa, synthetic construct
  REGION 1..19: note = Description of Artificial Sequence: Syntheticpeptide
RIKSVTDGETTDYAAPVKG

SEQ ID NO: 414 - protein, 19 aa, synthetic construct
  REGION 1..19: note = Description of Artificial Sequence: Syntheticpeptide
RIKSVTDGETTDYAAPVKG

SEQ ID NO: 415 - protein, 19 aa, synthetic construct
  REGION 1..19: note = Description of Artificial Sequence: Syntheticpeptide
RIKSVTDGETTDYAAPVKG

SEQ ID NO: 416 - protein, 19 aa, synthetic construct
  REGION 1..19: note = Description of Artificial Sequence: Syntheticpeptide
RIKSVTDGETTDYAAPVKG

SEQ ID NO: 417 - protein, 19 aa, synthetic construct
  REGION 1..19: note = Description of Artificial Sequence: Syntheticpeptide
RIKSVTDGETTDYAAPVKG

SEQ ID NO: 418 - protein, 19 aa, synthetic construct
  REGION 1..19: note = Description of Artificial Sequence: Syntheticpeptide
RIKSVTDGETTDYAAPVKG

SEQ ID NO: 419 - protein, 19 aa, synthetic construct
  REGION 1..19: note = Description of Artificial Sequence: Syntheticpeptide
RIKSVTDGETTDYAAPVKG

SEQ ID NO: 420 - protein, 19 aa, synthetic construct
  REGION 1..19: note = Description of Artificial Sequence: Syntheticpeptide
RIKSVTDGETTDYAAPVKG

SEQ ID NO: 421 - protein, 19 aa, synthetic construct
  REGION 1..19: note = Description of Artificial Sequence: Syntheticpeptide
RIKSVTDGETTDYAAPVKG

SEQ ID NO: 422 - protein, 19 aa, synthetic construct
  REGION 1..19: note = Description of Artificial Sequence: Syntheticpeptide
RIKSVTDGETTDYAAPVKG

SEQ ID NO: 423 - protein, 19 aa, synthetic construct
  REGION 1..19: note = Description of Artificial Sequence: Syntheticpeptide
RIKSVTDGETTDYAAPVKG

SEQ ID NO: 424 - protein, 19 aa, synthetic construct
  REGION 1..19: note = Description of Artificial Sequence: Syntheticpeptide
RIKSVTDGETTDYAAPVKG

SEQ ID NO: 425 - protein, 19 aa, synthetic construct
  REGION 1..19: note = Description of Artificial Sequence: Syntheticpeptide
RIKSVTDGETTDYAAPVKG

SEQ ID NO: 426 - protein, 19 aa, synthetic construct
  REGION 1..19: note = Description of Artificial Sequence: Syntheticpeptide
RIKSVTDGETTDYAAPVKG

SEQ ID NO: 427 - protein, 19 aa, synthetic construct
  REGION 1..19: note = Description of Artificial Sequence: Syntheticpeptide
RIKSVTDGETTDYAAPVKG

SEQ ID NO: 428 - protein, 19 aa, synthetic construct
  REGION 1..19: note = Description of Artificial Sequence: Syntheticpeptide
RIKSVTDGETTDYAAPVKG

SEQ ID NO: 429 - protein, 19 aa, synthetic construct
  REGION 1..19: note = Description of Artificial Sequence: Syntheticpeptide
RIKSVTDGETTDYAAPVKG

SEQ ID NO: 430 - protein, 19 aa, synthetic construct
  REGION 1..19: note = Description of Artificial Sequence: Syntheticpeptide
RIKSVTDGETTDYAAPVKG

SEQ ID NO: 431 - protein, 19 aa, synthetic construct
  REGION 1..19: note = Description of Artificial Sequence: Syntheticpeptide
RIKSVTDGETTDYAAPVKG

SEQ ID NO: 432 - protein, 19 aa, synthetic construct
  REGION 1..19: note = Description of Artificial Sequence: Syntheticpeptide
RIKSVTDGETTDYAAPVKG

SEQ ID NO: 433 - protein, 19 aa, synthetic construct
  REGION 1..19: note = Description of Artificial Sequence: Syntheticpeptide
RIKSVTDGETTDYAAPVKG

SEQ ID NO: 434 - protein, 19 aa, synthetic construct
  REGION 1..19: note = Description of Artificial Sequence: Syntheticpeptide
RIKSVTDGETTDYAAPVKG

SEQ ID NO: 435 - protein, 19 aa, synthetic construct
  REGION 1..19: note = Description of Artificial Sequence: Syntheticpeptide
RIKSVTDGETTDYAAPVKG

SEQ ID NO: 436 - protein, 19 aa, synthetic construct
  REGION 1..19: note = Description of Artificial Sequence: Syntheticpeptide
RIKSVTDGETTDYAAPVKG

SEQ ID NO: 437 - protein, 19 aa, synthetic construct
  REGION 1..19: note = Description of Artificial Sequence: Syntheticpeptide
RIKSVTDGETTDYAAPVKG

SEQ ID NO: 438 - protein, 19 aa, synthetic construct
  REGION 1..19: note = Description of Artificial Sequence: Syntheticpeptide
RIKSVTDGETTDYAAPVKG

SEQ ID NO: 439 - protein, 19 aa, synthetic construct
  REGION 1..19: note = Description of Artificial Sequence: Syntheticpeptide
RIKSVTDGETTDYAAPVKG

SEQ ID NO: 440 - protein, 19 aa, synthetic construct
  REGION 1..19: note = Description of Artificial Sequence: Syntheticpeptide
RIKSVTDGETTDYAAPVKG

SEQ ID NO: 441 - protein, 19 aa, synthetic construct
  REGION 1..19: note = Description of Artificial Sequence: Syntheticpeptide
RIKSVTDGETTDYAAPVKG

SEQ ID NO: 442 - protein, 19 aa, synthetic construct
  REGION 1..19: note = Description of Artificial Sequence: Syntheticpeptide
RIKSVTDGETTDYAAPVKG

SEQ ID NO: 443 - protein, 19 aa, synthetic construct
  REGION 1..19: note = Description of Artificial Sequence: Syntheticpeptide
RIKSVTDGETTDYAAPVKG

SEQ ID NO: 444 - protein, 19 aa, synthetic construct
  REGION 1..19: note = Description of Artificial Sequence: Syntheticpeptide
RIKSVTDGETTDYAAPVKG

SEQ ID NO: 445 - protein, 19 aa, synthetic construct
  REGION 1..19: note = Description of Artificial Sequence: Syntheticpeptide
RIKSVTDGETTDYAAPVKG

SEQ ID NO: 446 - protein, 19 aa, synthetic construct
  REGION 1..19: note = Description of Artificial Sequence: Syntheticpeptide
RIKSVTDGETTDYAAPVKG

SEQ ID NO: 447 - protein, 19 aa, synthetic construct
  REGION 1..19: note = Description of Artificial Sequence: Syntheticpeptide
RIKSVTDGETTDYAAPVKG

SEQ ID NO: 448 - protein, 19 aa, synthetic construct
  REGION 1..19: note = Description of Artificial Sequence: Syntheticpeptide
RIKSVTDGETTDYAAPVKG

SEQ ID NO: 449 - protein, 19 aa, synthetic construct
  REGION 1..19: note = Description of Artificial Sequence: Syntheticpeptide
RIKSVTDGQTTDYAAPVKG

SEQ ID NO: 450 - protein, 19 aa, synthetic construct
  REGION 1..19: note = Description of Artificial Sequence: Syntheticpeptide
RIKSVTDGETTDYAAPVKG

SEQ ID NO: 451 - protein, 19 aa, synthetic construct
  REGION 1..19: note = Description of Artificial Sequence: Syntheticpeptide
RIKSVTDGETTDYAAPVKG

SEQ ID NO: 452 - protein, 19 aa, synthetic construct
  REGION 1..19: note = Description of Artificial Sequence: Syntheticpeptide
RIKSVTDGETTDYAAPVKG

SEQ ID NO: 453 - protein, 19 aa, synthetic construct
  REGION 1..19: note = Description of Artificial Sequence: Syntheticpeptide
RIKSVTDGETTDYAAPVKG

SEQ ID NO: 454 - protein, 19 aa, synthetic construct
  REGION 1..19: note = Description of Artificial Sequence: Syntheticpeptide
RIKSVTDGETTDYAAPVKG

SEQ ID NO: 455 - protein, 19 aa, synthetic construct
  REGION 1..19: note = Description of Artificial Sequence: Syntheticpeptide
RIKSVTDGETTDYAAPVKG

SEQ ID NO: 456 - protein, 19 aa, synthetic construct
  REGION 1..19: note = Description of Artificial Sequence: Syntheticpeptide
RIKSVTDGETTDYAAPVKG

SEQ ID NO: 457 - protein, 19 aa, synthetic construct
  REGION 1..19: note = Description of Artificial Sequence: Syntheticpeptide
RIKSVTDGETTDYAAPVKG

SEQ ID NO: 458 - protein, 19 aa, synthetic construct
  REGION 1..19: note = Description of Artificial Sequence: Syntheticpeptide
RIKSVTDGETTDYAAPVKG

SEQ ID NO: 459 - protein, 19 aa, synthetic construct
  REGION 1..19: note = Description of Artificial Sequence: Syntheticpeptide
RIKSVTDGETTDYAAPVKG

SEQ ID NO: 460 - protein, 19 aa, synthetic construct
  REGION 1..19: note = Description of Artificial Sequence: Syntheticpeptide
RIKSVTDGETTDYAAPVKG

SEQ ID NO: 461 - protein, 19 aa, synthetic construct
  REGION 1..19: note = Description of Artificial Sequence: Syntheticpeptide
RIKSVTDGETTDYAAPVKG

SEQ ID NO: 462 - protein, 19 aa, synthetic construct
  REGION 1..19: note = Description of Artificial Sequence: Syntheticpeptide
RIKSVTDGETTDYAAPVKG

SEQ ID NO: 463 - protein, 19 aa, synthetic construct
  REGION 1..19: note = Description of Artificial Sequence: Syntheticpeptide
RIKSVTDGETTDYAAPVKG

SEQ ID NO: 464 - protein, 19 aa, synthetic construct
  REGION 1..19: note = Description of Artificial Sequence: Syntheticpeptide
RIKSVTDGETTDYAAPVKG

SEQ ID NO: 465 - protein, 19 aa, synthetic construct
  REGION 1..19: note = Description of Artificial Sequence: Syntheticpeptide
RIKSVTDGETTDYAAPVKG

SEQ ID NO: 466 - protein, 19 aa, synthetic construct
  REGION 1..19: note = Description of Artificial Sequence: Syntheticpeptide
RIKSVTDGETTDYAAPVKG

SEQ ID NO: 467 - protein, 19 aa, synthetic construct
  REGION 1..19: note = Description of Artificial Sequence: Syntheticpeptide
RIKSVTDGETTDYAAPVKG

SEQ ID NO: 468 - protein, 19 aa, synthetic construct
  REGION 1..19: note = Description of Artificial Sequence: Syntheticpeptide
RIKSVTDGETTDYAAPVKG

SEQ ID NO: 469 - protein, 19 aa, synthetic construct
  REGION 1..19: note = Description of Artificial Sequence: Syntheticpeptide
RIKSVTDGETTDYAAPVKG

SEQ ID NO: 470 - protein, 19 aa, synthetic construct
  REGION 1..19: note = Description of Artificial Sequence: Syntheticpeptide
RIKSVTDGETTDYAAPVKG

SEQ ID NO: 471 - protein, 19 aa, synthetic construct
  REGION 1..19: note = Description of Artificial Sequence: Syntheticpeptide
RIKSVTDGETTDYAAPVKG

SEQ ID NO: 472 - protein, 19 aa, synthetic construct
  REGION 1..19: note = Description of Artificial Sequence: Syntheticpeptide
RIKSVTDGETTDYAAPVKG

SEQ ID NO: 473 - protein, 19 aa, synthetic construct
  REGION 1..19: note = Description of Artificial Sequence: Syntheticpeptide
RIKSVTDGETTDYAAPVKG

SEQ ID NO: 474 - protein, 19 aa, synthetic construct
  REGION 1..19: note = Description of Artificial Sequence: Syntheticpeptide
RIKSVTDGETTDYAAPVKG

SEQ ID NO: 475 - protein, 19 aa, synthetic construct
  REGION 1..19: note = Description of Artificial Sequence: Syntheticpeptide
RIKSVTDGETTDYAAPVKG

SEQ ID NO: 476 - protein, 19 aa, synthetic construct
  REGION 1..19: note = Description of Artificial Sequence: Syntheticpeptide
RIKSVTDGETTDYAAPVKG

SEQ ID NO: 477 - protein, 19 aa, synthetic construct
  REGION 1..19: note = Description of Artificial Sequence: Syntheticpeptide
RIKSVTDGETTDYAAPVKG

SEQ ID NO: 478 - protein, 19 aa, synthetic construct
  REGION 1..19: note = Description of Artificial Sequence: Syntheticpeptide
RIKSVTDGETTDYAAPVKG

SEQ ID NO: 479 - protein, 19 aa, synthetic construct
  REGION 1..19: note = Description of Artificial Sequence: Syntheticpeptide
RIKSVTDGETTDYAAPVKG

SEQ ID NO: 480 - protein, 19 aa, synthetic construct
  REGION 1..19: note = Description of Artificial Sequence: Syntheticpeptide
RIKSVTDGETTDYAAPVKG

SEQ ID NO: 481 - protein, 19 aa, synthetic construct
  REGION 1..19: note = Description of Artificial Sequence: Syntheticpeptide
RIKSVTDGETTDYAAPVKG

SEQ ID NO: 482 - protein, 19 aa, synthetic construct
  REGION 1..19: note = Description of Artificial Sequence: Syntheticpeptide
RIKSVTDGETTDYAAPVKG

SEQ ID NO: 483 - protein, 19 aa, synthetic construct
  REGION 1..19: note = Description of Artificial Sequence: Syntheticpeptide
RIKSVTDGETTDYAAPVKG

SEQ ID NO: 484 - protein, 19 aa, synthetic construct
  REGION 1..19: note = Description of Artificial Sequence: Syntheticpeptide
RIKSVTDGETTDYAAPVKG

SEQ ID NO: 485 - protein, 19 aa, synthetic construct
  REGION 1..19: note = Description of Artificial Sequence: Syntheticpeptide
RIKSVTDGETTDYAAPVKG

SEQ ID NO: 486 - protein, 19 aa, synthetic construct
  REGION 1..19: note = Description of Artificial Sequence: Syntheticpeptide
RIKSVTDGETTDYAAPVKG

SEQ ID NO: 487 - protein, 19 aa, synthetic construct
  REGION 1..19: note = Description of Artificial Sequence: Syntheticpeptide
RIKSVTDGETTDYAAPVKG

SEQ ID NO: 488 - protein, 19 aa, synthetic construct
  REGION 1..19: note = Description of Artificial Sequence: Syntheticpeptide
RIKSVTDGETTDYAAPVKG

SEQ ID NO: 489 - protein, 19 aa, synthetic construct
  REGION 1..19: note = Description of Artificial Sequence: Syntheticpeptide
RIKSVTDGETTDYAAPVKG

SEQ ID NO: 490 - protein, 19 aa, synthetic construct
  REGION 1..19: note = Description of Artificial Sequence: Syntheticpeptide
RIKSVTDGETTDYAAPVKG

SEQ ID NO: 491 - protein, 19 aa, synthetic construct
  REGION 1..19: note = Description of Artificial Sequence: Syntheticpeptide
RIKSVTDGETTDYAAPVKG

SEQ ID NO: 492 - protein, 19 aa, synthetic construct
  REGION 1..19: note = Description of Artificial Sequence: Syntheticpeptide
RIKSVTDGETTDYAAPVKG

SEQ ID NO: 493 - protein, 19 aa, synthetic construct
  REGION 1..19: note = Description of Artificial Sequence: Syntheticpeptide
RIKSVTDGETTDYAAPVKG

SEQ ID NO: 494 - protein, 19 aa, synthetic construct
  REGION 1..19: note = Description of Artificial Sequence: Syntheticpeptide
RIKSVTDGETTDYAAPVKG

SEQ ID NO: 495 - protein, 19 aa, synthetic construct
  REGION 1..19: note = Description of Artificial Sequence: Syntheticpeptide
RIKSVTDGETTDYAAPVKG

SEQ ID NO: 496 - protein, 19 aa, synthetic construct
  REGION 1..19: note = Description of Artificial Sequence: Syntheticpeptide
RIKSVTDGETTDYAAPVKG

SEQ ID NO: 497 - protein, 19 aa, synthetic construct
  REGION 1..19: note = Description of Artificial Sequence: Syntheticpeptide
RIKSVTDGETTDYAAPVKG

SEQ ID NO: 498 - protein, 19 aa, synthetic construct
  REGION 1..19: note = Description of Artificial Sequence: Syntheticpeptide
RIKSVTDGETTDYAAPVKG

SEQ ID NO: 499 - protein, 19 aa, synthetic construct
  REGION 1..19: note = Description of Artificial Sequence: Syntheticpeptide
RIKSVTDGETTDYAAPVKG

SEQ ID NO: 500 - protein, 19 aa, synthetic construct
  REGION 1..19: note = Description of Artificial Sequence: Syntheticpeptide
RIKSVTDGETTDYAAPVKG

SEQ ID NO: 501 - protein, 19 aa, synthetic construct
  REGION 1..19: note = Description of Artificial Sequence: Syntheticpeptide
RIKSVTDGETTDYAAPVKG

SEQ ID NO: 502 - protein, 19 aa, synthetic construct
  REGION 1..19: note = Description of Artificial Sequence: Syntheticpeptide
RIKSVTDGETTDYAAPVKG

SEQ ID NO: 503 - protein, 19 aa, synthetic construct
  REGION 1..19: note = Description of Artificial Sequence: Syntheticpeptide
RIKSVTDGETTDYAAPVKG

SEQ ID NO: 504 - protein, 19 aa, synthetic construct
  REGION 1..19: note = Description of Artificial Sequence: Syntheticpeptide
RIKSVTDGETTEYAASVKG

SEQ ID NO: 505 - protein, 19 aa, synthetic construct
  REGION 1..19: note = Description of Artificial Sequence: Syntheticpeptide
RIKSVTDGETTEYAASVKG

SEQ ID NO: 506 - protein, 19 aa, synthetic construct
  REGION 1..19: note = Description of Artificial Sequence: Syntheticpeptide
FIKSVTDGETTEYAASVKG

SEQ ID NO: 507 - protein, 19 aa, synthetic construct
  REGION 1..19: note = Description of Artificial Sequence: Syntheticpeptide
RIKSVTDGETTDYAAPVKG

SEQ ID NO: 508 - protein, 19 aa, synthetic construct
  REGION 1..19: note = Description of Artificial Sequence: Syntheticpeptide
RIKSVTDGETTDYAAPVKG

SEQ ID NO: 509 - protein, 19 aa, synthetic construct
  REGION 1..19: note = Description of Artificial Sequence: Syntheticpeptide
RIKSVTDGETTDYAAPVKG

SEQ ID NO: 510 - protein, 19 aa, synthetic construct
  REGION 1..19: note = Description of Artificial Sequence: Syntheticpeptide
RIKSVTDGETTDYAAPVKG

SEQ ID NO: 511 - protein, 19 aa, synthetic construct
  REGION 1..19: note = Description of Artificial Sequence: Syntheticpeptide
RIKSVTDGETTDYAAPVKG

SEQ ID NO: 512 - protein, 19 aa, synthetic construct
  REGION 1..19: note = Description of Artificial Sequence: Syntheticpeptide
RIKSVTDGETTDYAAPVKG

SEQ ID NO: 513 - protein, 19 aa, synthetic construct
  REGION 1..19: note = Description of Artificial Sequence: Syntheticpeptide
RIKSVTDGETTDYAAPVKG

SEQ ID NO: 514 - protein, 19 aa, synthetic construct
  REGION 1..19: note = Description of Artificial Sequence: Syntheticpeptide
RIKSVTDGETTDYAAPVKG

SEQ ID NO: 515 - protein, 19 aa, synthetic construct
  REGION 1..19: note = Description of Artificial Sequence: Syntheticpeptide
RIKSVTDGETTDYAAPVKG

SEQ ID NO: 516 - protein, 19 aa, synthetic construct
  REGION 1..19: note = Description of Artificial Sequence: Syntheticpeptide
RIKSVTDGETTDYAAPVKG

SEQ ID NO: 517 - protein, 19 aa, synthetic construct
  REGION 1..19: note = Description of Artificial Sequence: Syntheticpeptide
RIKSVTDGETTDYAAPVKG

SEQ ID NO: 518 - protein, 19 aa, synthetic construct
  REGION 1..19: note = Description of Artificial Sequence: Syntheticpeptide
RIKSVTDGETTDYAAPVKG

SEQ ID NO: 519 - protein, 19 aa, synthetic construct
  REGION 1..19: note = Description of Artificial Sequence: Syntheticpeptide
RIKSVTDGETTDYAAPVKG

SEQ ID NO: 520 - protein, 19 aa, synthetic construct
  REGION 1..19: note = Description of Artificial Sequence: Syntheticpeptide
RIKSVTDGETTDYAAPVKG

SEQ ID NO: 521 - protein, 19 aa, synthetic construct
  REGION 1..19: note = Description of Artificial Sequence: Syntheticpeptide
RIKSVTDGETTDYAAPVKG

SEQ ID NO: 522 - protein, 19 aa, synthetic construct
  REGION 1..19: note = Description of Artificial Sequence: Syntheticpeptide
RIKSVTDGETTDYAAPVKG

SEQ ID NO: 523 - protein, 19 aa, synthetic construct
  REGION 1..19: note = Description of Artificial Sequence: Syntheticpeptide
RIKSVTDGETTDYAAPVKG

SEQ ID NO: 524 - protein, 19 aa, synthetic construct
  REGION 1..19: note = Description of Artificial Sequence: Syntheticpeptide
RIKSVTDGETTDYAAPVKG

SEQ ID NO: 525 - protein, 19 aa, synthetic construct
  REGION 1..19: note = Description of Artificial Sequence: Syntheticpeptide
RIKSVTDGETTDYAAPVKG

SEQ ID NO: 526 - protein, 19 aa, synthetic construct
  REGION 1..19: note = Description of Artificial Sequence: Syntheticpeptide
RIKSVTDGETTDYAAPVKG

SEQ ID NO: 527 - protein, 19 aa, synthetic construct
  REGION 1..19: note = Description of Artificial Sequence: Syntheticpeptide
RIKSVTDGETTDYAAPVKG

SEQ ID NO: 528 - protein, 19 aa, synthetic construct
  REGION 1..19: note = Description of Artificial Sequence: Syntheticpeptide
RIKSVTDGETTDYAAPVKG

SEQ ID NO: 529 - protein, 19 aa, synthetic construct
  REGION 1..19: note = Description of Artificial Sequence: Syntheticpeptide
RIKSVTDGETTDYAAPVKG

SEQ ID NO: 530 - protein, 19 aa, synthetic construct
  REGION 1..19: note = Description of Artificial Sequence: Syntheticpeptide
RIKSVTDGETTDYAAPVKG

SEQ ID NO: 531 - protein, 19 aa, synthetic construct
  REGION 1..19: note = Description of Artificial Sequence: Syntheticpeptide
RIKSVTDGETTDYAAPVKG

SEQ ID NO: 532 - protein, 19 aa, synthetic construct
  REGION 1..19: note = Description of Artificial Sequence: Syntheticpeptide
RIKSVTDGETTDYAAPVKG

SEQ ID NO: 533 - protein, 19 aa, synthetic construct
  REGION 1..19: note = Description of Artificial Sequence: Syntheticpeptide
RIKSVTDGETTDYAAPVKG

SEQ ID NO: 534 - protein, 19 aa, synthetic construct
  REGION 1..19: note = Description of Artificial Sequence: Syntheticpeptide
RIKSVTDGETTDYAAPVKG

SEQ ID NO: 535 - protein, 19 aa, synthetic construct
  REGION 1..19: note = Description of Artificial Sequence: Syntheticpeptide
RIKSVTDGETTDYAAPVKG

SEQ ID NO: 536 - protein, 19 aa, synthetic construct
  REGION 1..19: note = Description of Artificial Sequence: Syntheticpeptide
RIKSVTDGETTDYAAPVKG

SEQ ID NO: 537 - protein, 19 aa, synthetic construct
  REGION 1..19: note = Description of Artificial Sequence: Syntheticpeptide
RIKSVTDGETTDYAAPVKG

SEQ ID NO: 538 - protein, 19 aa, synthetic construct
  REGION 1..19: note = Description of Artificial Sequence: Syntheticpeptide
RIKSVTDGETTDYAAPVKG

SEQ ID NO: 539 - protein, 19 aa, synthetic construct
  REGION 1..19: note = Description of Artificial Sequence: Syntheticpeptide
RIKSVTDGETTDYAAPVKG

SEQ ID NO: 540 - protein, 19 aa, synthetic construct
  REGION 1..19: note = Description of Artificial Sequence: Syntheticpeptide
RIKAADDGKQTDYAAPVKG

SEQ ID NO: 541 - protein, 19 aa, synthetic construct
  REGION 1..19: note = Description of Artificial Sequence: Syntheticpeptide
RIKSVQDGEQTDYAAPVKG

SEQ ID NO: 542 - protein, 19 aa, synthetic construct
  REGION 1..19: note = Description of Artificial Sequence: Syntheticpeptide
RIKSVTDGETTDYAAPVKG

SEQ ID NO: 543 - protein, 19 aa, synthetic construct
  REGION 1..19: note = Description of Artificial Sequence: Syntheticpeptide
RIKSVTDGETTDYAAPVKG

SEQ ID NO: 544 - protein, 19 aa, synthetic construct
  REGION 1..19: note = Description of Artificial Sequence: Syntheticpeptide
RIKSVTDGETTDYAAPVKG

SEQ ID NO: 545 - protein, 19 aa, synthetic construct
  REGION 1..19: note = Description of Artificial Sequence: Syntheticpeptide
RIKSVTDGETTDYAAPVKG

SEQ ID NO: 546 - protein, 19 aa, synthetic construct
  REGION 1..19: note = Description of Artificial Sequence: Syntheticpeptide
RIKAADDGKQTDYAAPVKG

SEQ ID NO: 547 - protein, 19 aa, synthetic construct
  REGION 1..19: note = Description of Artificial Sequence: Syntheticpeptide
RIKAADDGKQTDYAAPVKG

SEQ ID NO: 548 - protein, 19 aa, synthetic construct
  REGION 1..19: note = Description of Artificial Sequence: Syntheticpeptide
RIKAADDGKQTDYAAPVKG

SEQ ID NO: 549 - protein, 19 aa, synthetic construct
  REGION 1..19: note = Description of Artificial Sequence: Syntheticpeptide
RIKAADDGKQTDYAAPVKG

SEQ ID NO: 550 - protein, 19 aa, synthetic construct
  REGION 1..19: note = Description of Artificial Sequence: Syntheticpeptide
RIKAADDGKQTDYAAPVKG

SEQ ID NO: 551 - protein, 19 aa, synthetic construct
  REGION 1..19: note = Description of Artificial Sequence: Syntheticpeptide
RIKAVTDGHTTDYAAPVKG

SEQ ID NO: 552 - protein, 19 aa, synthetic construct
  REGION 1..19: note = Description of Artificial Sequence: Syntheticpeptide
RIKSVTDGQATDYAAPVKG

SEQ ID NO: 553 - protein, 19 aa, synthetic construct
  REGION 1..19: note = Description of Artificial Sequence: Syntheticpeptide
RIKSVTDGETTDYAAPVKG

SEQ ID NO: 554 - protein, 19 aa, synthetic construct
  REGION 1..19: note = Description of Artificial Sequence: Syntheticpeptide
RIKSVTDAETTDYAAPVKG

SEQ ID NO: 555 - protein, 19 aa, synthetic construct
  REGION 1..19: note = Description of Artificial Sequence: Syntheticpeptide
RIKSTSDGGITDYAAPVKG

SEQ ID NO: 556 - protein, 19 aa, synthetic construct
  REGION 1..19: note = Description of Artificial Sequence: Syntheticpeptide
RIKSVSDGETTDYAAPVKG

SEQ ID NO: 557 - protein, 31 aa, synthetic construct; identical to SEQ ID NO: 34
  REGION 1..31: note = Description of Artificial Sequence: Syntheticpolypeptide

SEQ ID NO: 558 - protein, 31 aa, synthetic construct; identical to SEQ ID NO: 34
  REGION 1..31: note = Description of Artificial Sequence: Syntheticpolypeptide

SEQ ID NO: 559 - protein, 31 aa, synthetic construct; identical to SEQ ID NO: 41
  REGION 1..31: note = Description of Artificial Sequence: Syntheticpolypeptide

SEQ ID NO: 560 - protein, 31 aa, synthetic construct; identical to SEQ ID NO: 21
  REGION 1..31: note = Description of Artificial Sequence: Syntheticpolypeptide

SEQ ID NO: 561 - protein, 31 aa, synthetic construct; identical to SEQ ID NO: 21
  REGION 1..31: note = Description of Artificial Sequence: Syntheticpolypeptide

SEQ ID NO: 562 - protein, 31 aa, synthetic construct; identical to SEQ ID NO: 21
  REGION 1..31: note = Description of Artificial Sequence: Syntheticpolypeptide

SEQ ID NO: 563 - protein, 31 aa, synthetic construct; identical to SEQ ID NO: 21
  REGION 1..31: note = Description of Artificial Sequence: Syntheticpolypeptide

SEQ ID NO: 564 - protein, 31 aa, synthetic construct; identical to SEQ ID NO: 21
  REGION 1..31: note = Description of Artificial Sequence: Syntheticpolypeptide

SEQ ID NO: 565 - protein, 31 aa, synthetic construct; identical to SEQ ID NO: 21
  REGION 1..31: note = Description of Artificial Sequence: Syntheticpolypeptide

SEQ ID NO: 566 - protein, 31 aa, synthetic construct; identical to SEQ ID NO: 21
  REGION 1..31: note = Description of Artificial Sequence: Syntheticpolypeptide

SEQ ID NO: 567 - protein, 31 aa, synthetic construct; identical to SEQ ID NO: 21
  REGION 1..31: note = Description of Artificial Sequence: Syntheticpolypeptide

SEQ ID NO: 568 - protein, 31 aa, synthetic construct; identical to SEQ ID NO: 21
  REGION 1..31: note = Description of Artificial Sequence: Syntheticpolypeptide

SEQ ID NO: 569 - protein, 31 aa, synthetic construct; identical to SEQ ID NO: 21
  REGION 1..31: note = Description of Artificial Sequence: Syntheticpolypeptide

SEQ ID NO: 570 - protein, 31 aa, synthetic construct; identical to SEQ ID NO: 21
  REGION 1..31: note = Description of Artificial Sequence: Syntheticpolypeptide

SEQ ID NO: 571 - protein, 31 aa, synthetic construct; identical to SEQ ID NO: 21
  REGION 1..31: note = Description of Artificial Sequence: Syntheticpolypeptide

SEQ ID NO: 572 - protein, 31 aa, synthetic construct; identical to SEQ ID NO: 21
  REGION 1..31: note = Description of Artificial Sequence: Syntheticpolypeptide

SEQ ID NO: 573 - protein, 31 aa, synthetic construct; identical to SEQ ID NO: 21
  REGION 1..31: note = Description of Artificial Sequence: Syntheticpolypeptide

SEQ ID NO: 574 - protein, 31 aa, synthetic construct; identical to SEQ ID NO: 21
  REGION 1..31: note = Description of Artificial Sequence: Syntheticpolypeptide

SEQ ID NO: 575 - protein, 31 aa, synthetic construct; identical to SEQ ID NO: 21
  REGION 1..31: note = Description of Artificial Sequence: Syntheticpolypeptide

SEQ ID NO: 576 - protein, 31 aa, synthetic construct; identical to SEQ ID NO: 21
  REGION 1..31: note = Description of Artificial Sequence: Syntheticpolypeptide

SEQ ID NO: 577 - protein, 31 aa, synthetic construct; identical to SEQ ID NO: 21
  REGION 1..31: note = Description of Artificial Sequence: Syntheticpolypeptide

SEQ ID NO: 578 - protein, 31 aa, synthetic construct; identical to SEQ ID NO: 21
  REGION 1..31: note = Description of Artificial Sequence: Syntheticpolypeptide

SEQ ID NO: 579 - protein, 31 aa, synthetic construct; identical to SEQ ID NO: 21
  REGION 1..31: note = Description of Artificial Sequence: Syntheticpolypeptide

SEQ ID NO: 580 - protein, 31 aa, synthetic construct; identical to SEQ ID NO: 21
  REGION 1..31: note = Description of Artificial Sequence: Syntheticpolypeptide

SEQ ID NO: 581 - protein, 31 aa, synthetic construct; identical to SEQ ID NO: 21
  REGION 1..31: note = Description of Artificial Sequence: Syntheticpolypeptide

SEQ ID NO: 582 - protein, 31 aa, synthetic construct; identical to SEQ ID NO: 21
  REGION 1..31: note = Description of Artificial Sequence: Syntheticpolypeptide

SEQ ID NO: 583 - protein, 31 aa, synthetic construct; identical to SEQ ID NO: 21
  REGION 1..31: note = Description of Artificial Sequence: Syntheticpolypeptide

SEQ ID NO: 584 - protein, 31 aa, synthetic construct; identical to SEQ ID NO: 21
  REGION 1..31: note = Description of Artificial Sequence: Syntheticpolypeptide

SEQ ID NO: 585 - protein, 31 aa, synthetic construct; identical to SEQ ID NO: 21
  REGION 1..31: note = Description of Artificial Sequence: Syntheticpolypeptide

SEQ ID NO: 586 - protein, 31 aa, synthetic construct; identical to SEQ ID NO: 21
  REGION 1..31: note = Description of Artificial Sequence: Syntheticpolypeptide

SEQ ID NO: 587 - protein, 31 aa, synthetic construct; identical to SEQ ID NO: 21
  REGION 1..31: note = Description of Artificial Sequence: Syntheticpolypeptide

SEQ ID NO: 588 - protein, 31 aa, synthetic construct; identical to SEQ ID NO: 21
  REGION 1..31: note = Description of Artificial Sequence: Syntheticpolypeptide

SEQ ID NO: 589 - protein, 31 aa, synthetic construct
  REGION 1..31: note = Description of Artificial Sequence: Syntheticpolypeptide
ISSFCCRGGSCPSHDTSYCGGQYKSYYYMDV

SEQ ID NO: 590 - protein, 31 aa, synthetic construct
  REGION 1..31: note = Description of Artificial Sequence: Syntheticpolypeptide
TTSFCCRGGSCPSHDTSYCGGQYKSYYYMDV

SEQ ID NO: 591 - protein, 31 aa, synthetic construct
  REGION 1..31: note = Description of Artificial Sequence: Syntheticpolypeptide
TSPFCCRGGSCPSHDTSYCGGQYKSYYYMDV

SEQ ID NO: 592 - protein, 31 aa, synthetic construct
  REGION 1..31: note = Description of Artificial Sequence: Syntheticpolypeptide
TSAFCCRGGSCPSHDTSYCGGQYKSYYYMDV

SEQ ID NO: 593 - protein, 31 aa, synthetic construct
  REGION 1..31: note = Description of Artificial Sequence: Syntheticpolypeptide
TSSYCCRGGSCPSHDTSYCGGQYKSYYYMDV

SEQ ID NO: 594 - protein, 31 aa, synthetic construct
  REGION 1..31: note = Description of Artificial Sequence: Syntheticpolypeptide
TSSFCCLGGSCPSHDTSYCGGQYKSYYYMDV

SEQ ID NO: 595 - protein, 31 aa, synthetic construct
  REGION 1..31: note = Description of Artificial Sequence: Syntheticpolypeptide
TSSFCCHGGSCPSHDTSYCGGQYKSYYYMDV

SEQ ID NO: 596 - protein, 31 aa, synthetic construct
  REGION 1..31: note = Description of Artificial Sequence: Syntheticpolypeptide
TSSFCCQGGSCPSHDTSYCGGQYKSYYYMDV

SEQ ID NO: 597 - protein, 31 aa, synthetic construct
  REGION 1..31: note = Description of Artificial Sequence: Syntheticpolypeptide
TSSFCCRSGSCPSHDTSYCGGQYKSYYYMDV

SEQ ID NO: 598 - protein, 31 aa, synthetic construct
  REGION 1..31: note = Description of Artificial Sequence: Syntheticpolypeptide
TSSFCCRGASCPSHDTSYCGGQYKSYYYMDV

SEQ ID NO: 599 - protein, 31 aa, synthetic construct
  REGION 1..31: note = Description of Artificial Sequence: Syntheticpolypeptide
TSSFCCRGKSCPSHDTSYCGGQYKSYYYMDV

SEQ ID NO: 600 - protein, 31 aa, synthetic construct
  REGION 1..31: note = Description of Artificial Sequence: Syntheticpolypeptide
TSSFCCRGNSCPSHDTSYCGGQYKSYYYMDV

SEQ ID NO: 601 - protein, 31 aa, synthetic construct
  REGION 1..31: note = Description of Artificial Sequence: Syntheticpolypeptide
TSSFCCRGGNCPSHDTSYCGGQYKSYYYMDV

SEQ ID NO: 602 - protein, 31 aa, synthetic construct
  REGION 1..31: note = Description of Artificial Sequence: Syntheticpolypeptide
TSSFCCRGGQCPSHDTSYCGGQYKSYYYMDV

SEQ ID NO: 603 - protein, 31 aa, synthetic construct
  REGION 1..31: note = Description of Artificial Sequence: Syntheticpolypeptide
TSSFCCRGGACPSHDTSYCGGQYKSYYYMDV

SEQ ID NO: 604 - protein, 31 aa, synthetic construct
  REGION 1..31: note = Description of Artificial Sequence: Syntheticpolypeptide
TSSFCCRGGSCASHDTSYCGGQYKSYYYMDV

SEQ ID NO: 605 - protein, 31 aa, synthetic construct
  REGION 1..31: note = Description of Artificial Sequence: Syntheticpolypeptide
TSSFCCRGGSCLSHDTSYCGGQYKSYYYMDV

SEQ ID NO: 606 - protein, 31 aa, synthetic construct
  REGION 1..31: note = Description of Artificial Sequence: Syntheticpolypeptide
TSSFCCRGGSCPAHDTSYCGGQYKSYYYMDV

SEQ ID NO: 607 - protein, 31 aa, synthetic construct
  REGION 1..31: note = Description of Artificial Sequence: Syntheticpolypeptide
TSSFCCRGGSCPNHDTSYCGGQYKSYYYMDV

SEQ ID NO: 608 - protein, 31 aa, synthetic construct
  REGION 1..31: note = Description of Artificial Sequence: Syntheticpolypeptide
TSSFCCRGGSCPSSDTSYCGGQYKSYYYMDV

SEQ ID NO: 609 - protein, 31 aa, synthetic construct
  REGION 1..31: note = Description of Artificial Sequence: Syntheticpolypeptide
TSSFCCRGGSCPSQDTSYCGGQYKSYYYMDV

SEQ ID NO: 610 - protein, 31 aa, synthetic construct
  REGION 1..31: note = Description of Artificial Sequence: Syntheticpolypeptide
TSSFCCRGGSCPSHETSYCGGQYKSYYYMDV

SEQ ID NO: 611 - protein, 31 aa, synthetic construct
  REGION 1..31: note = Description of Artificial Sequence: Syntheticpolypeptide
TSSFCCRGGSCPSHDQSYCGGQYKSYYYMDV

SEQ ID NO: 612 - protein, 31 aa, synthetic construct
  REGION 1..31: note = Description of Artificial Sequence: Syntheticpolypeptide
TSSFCCRGGSCPSHDTSMCGGQYKSYYYMDV

SEQ ID NO: 613 - protein, 31 aa, synthetic construct
  REGION 1..31: note = Description of Artificial Sequence: Syntheticpolypeptide
TSSFCCRGGSCPSHDTSYCAGQYKSYYYMDV

SEQ ID NO: 614 - protein, 31 aa, synthetic construct
  REGION 1..31: note = Description of Artificial Sequence: Syntheticpolypeptide
TSSFCCRGGSCPSHDTSYCNGQYKSYYYMDV

SEQ ID NO: 615 - protein, 31 aa, synthetic construct
  REGION 1..31: note = Description of Artificial Sequence: Syntheticpolypeptide
TSSFCCRGGSCPSHDTSYCGNQYKSYYYMDV

SEQ ID NO: 616 - protein, 31 aa, synthetic construct
  REGION 1..31: note = Description of Artificial Sequence: Syntheticpolypeptide
TSSFCCRGGSCPSHDTSYCGAQYKSYYYMDV

SEQ ID NO: 617 - protein, 31 aa, synthetic construct
  REGION 1..31: note = Description of Artificial Sequence: Syntheticpolypeptide
TSSFCCRGGSCPSHDTSYCGGSYKSYYYMDV

SEQ ID NO: 618 - protein, 31 aa, synthetic construct; identical to SEQ ID NO: 33
  REGION 1..31: note = Description of Artificial Sequence: Syntheticpolypeptide

SEQ ID NO: 619 - protein, 31 aa, synthetic construct
  REGION 1..31: note = Description of Artificial Sequence: Syntheticpolypeptide
TSSFCCRGGSCPSHDTSYCGGQFKSYYYMDV

SEQ ID NO: 620 - protein, 31 aa, synthetic construct
  REGION 1..31: note = Description of Artificial Sequence: Syntheticpolypeptide
TSSFCCRGGSCPSHDTSYCGGQYPSYYYMDV

SEQ ID NO: 621 - protein, 31 aa, synthetic construct
  REGION 1..31: note = Description of Artificial Sequence: Syntheticpolypeptide
TSSFCCRGGSCPSHDTSYCGGQYASYYYMDV

SEQ ID NO: 622 - protein, 31 aa, synthetic construct
  REGION 1..31: note = Description of Artificial Sequence: Syntheticpolypeptide
TSSFCCRGGSCPSHDTSYCGGQYQSYYYMDV

SEQ ID NO: 623 - protein, 31 aa, synthetic construct
  REGION 1..31: note = Description of Artificial Sequence: Syntheticpolypeptide
TSSFCCRGGSCPSHDTSYCGGQYKDYYYMDV

SEQ ID NO: 624 - protein, 31 aa, synthetic construct; identical to SEQ ID NO: 28
  REGION 1..31: note = Description of Artificial Sequence: Syntheticpolypeptide

SEQ ID NO: 625 - protein, 31 aa, synthetic construct
  REGION 1..31: note = Description of Artificial Sequence: Syntheticpolypeptide
TSSFCCRGGSCPSHDTSYCGGQYKSYFYMDV

SEQ ID NO: 626 - protein, 31 aa, synthetic construct
  REGION 1..31: note = Description of Artificial Sequence: Syntheticpolypeptide
TSSFCCRGGSCPSHDTSYCGGQYKSYYWMDV

SEQ ID NO: 627 - protein, 31 aa, synthetic construct
  REGION 1..31: note = Description of Artificial Sequence: Syntheticpolypeptide
TSSFCCRGGSCPSHDTSYCGGQYKSYYLMDV

SEQ ID NO: 628 - protein, 31 aa, synthetic construct
  REGION 1..31: note = Description of Artificial Sequence: Syntheticpolypeptide
TSSFCCRGGSCPSHDTSYCGGQYKSYYYVDV

SEQ ID NO: 629 - protein, 31 aa, synthetic construct
  REGION 1..31: note = Description of Artificial Sequence: Syntheticpolypeptide
TSSFCCRGGSCPSHDTSYCGGQYKSYYYFDV

SEQ ID NO: 630 - protein, 31 aa, synthetic construct
  REGION 1..31: note = Description of Artificial Sequence: Syntheticpolypeptide
TSSFCCRGGSCPSHDTSYCGGQYKSYYYMNV

SEQ ID NO: 631 - protein, 31 aa, synthetic construct
  REGION 1..31: note = Description of Artificial Sequence: Syntheticpolypeptide
TSSFCCRGGSCPSHDTSYCGGQYKSYYYMDI

SEQ ID NO: 632 - protein, 31 aa, synthetic construct
  REGION 1..31: note = Description of Artificial Sequence: Syntheticpolypeptide
TSSFCCRGGSCPSHDTSYCGGQYKSYYYMDP

SEQ ID NO: 633 - protein, 31 aa, synthetic construct
  REGION 1..31: note = Description of Artificial Sequence: Syntheticpolypeptide
TSSFCCRGGSCPSHDTSYCGGQFKDYYYMDV

SEQ ID NO: 634 - protein, 31 aa, synthetic construct
  REGION 1..31: note = Description of Artificial Sequence: Syntheticpolypeptide
TSSFCCRGGSCPSHDTSYCGGQSKQYYYMDV

SEQ ID NO: 635 - protein, 31 aa, synthetic construct
  REGION 1..31: note = Description of Artificial Sequence: Syntheticpolypeptide
TSSFCCRGGSCPSHDTSYCGGQSKKYYYMDV

SEQ ID NO: 636 - protein, 31 aa, synthetic construct
  REGION 1..31: note = Description of Artificial Sequence: Syntheticpolypeptide
TSSFSCRGGSCPSHDTSYSGGQYKSYYYMDV

SEQ ID NO: 637 - protein, 31 aa, synthetic construct
  REGION 1..31: note = Description of Artificial Sequence: Syntheticpolypeptide
TSSFACRGGSCPSHDTSYVGGQYKSYYYMDV

SEQ ID NO: 638 - protein, 31 aa, synthetic construct
  REGION 1..31: note = Description of Artificial Sequence: Syntheticpolypeptide
TSSFCCRGNSCPAHDTSYCGGQYPSYYYMDV

SEQ ID NO: 639 - protein, 31 aa, synthetic construct
  REGION 1..31: note = Description of Artificial Sequence: Syntheticpolypeptide
TSSYCCLGGSCPSHDTSYCGGSYKSYYYMDV

SEQ ID NO: 640 - protein, 31 aa, synthetic construct
  REGION 1..31: note = Description of Artificial Sequence: Syntheticpolypeptide
TSSFCCRGKSCPSHDNSYCGGQYASYYYMDV

SEQ ID NO: 641 - protein, 31 aa, synthetic construct
  REGION 1..31: note = Description of Artificial Sequence: Syntheticpolypeptide
TSSYCCRGGSCPSHDTSYCGGQFKSYYYMDP

SEQ ID NO: 642 - protein, 31 aa, synthetic construct
  REGION 1..31: note = Description of Artificial Sequence: Syntheticpolypeptide
TSTFCCRGGSCLSHDTSYCGGQYKSYYWMDV

SEQ ID NO: 643 - protein, 31 aa, synthetic construct; identical to SEQ ID NO: 21
  REGION 1..31: note = Description of Artificial Sequence: Syntheticpolypeptide

SEQ ID NO: 644 - protein, 31 aa, synthetic construct; identical to SEQ ID NO: 21
  REGION 1..31: note = Description of Artificial Sequence: Syntheticpolypeptide

SEQ ID NO: 645 - protein, 31 aa, synthetic construct; identical to SEQ ID NO: 21
  REGION 1..31: note = Description of Artificial Sequence: Syntheticpolypeptide

SEQ ID NO: 646 - protein, 31 aa, synthetic construct; identical to SEQ ID NO: 21
  REGION 1..31: note = Description of Artificial Sequence: Syntheticpolypeptide

SEQ ID NO: 647 - protein, 31 aa, synthetic construct; identical to SEQ ID NO: 21
  REGION 1..31: note = Description of Artificial Sequence: Syntheticpolypeptide

SEQ ID NO: 648 - protein, 31 aa, synthetic construct; identical to SEQ ID NO: 21
  REGION 1..31: note = Description of Artificial Sequence: Syntheticpolypeptide

SEQ ID NO: 649 - protein, 31 aa, synthetic construct; identical to SEQ ID NO: 21
  REGION 1..31: note = Description of Artificial Sequence: Syntheticpolypeptide

SEQ ID NO: 650 - protein, 31 aa, synthetic construct; identical to SEQ ID NO: 21
  REGION 1..31: note = Description of Artificial Sequence: Syntheticpolypeptide

SEQ ID NO: 651 - protein, 31 aa, synthetic construct; identical to SEQ ID NO: 21
  REGION 1..31: note = Description of Artificial Sequence: Syntheticpolypeptide

SEQ ID NO: 652 - protein, 31 aa, synthetic construct; identical to SEQ ID NO: 21
  REGION 1..31: note = Description of Artificial Sequence: Syntheticpolypeptide

SEQ ID NO: 653 - protein, 31 aa, synthetic construct; identical to SEQ ID NO: 21
  REGION 1..31: note = Description of Artificial Sequence: Syntheticpolypeptide

SEQ ID NO: 654 - protein, 31 aa, synthetic construct; identical to SEQ ID NO: 21
  REGION 1..31: note = Description of Artificial Sequence: Syntheticpolypeptide

SEQ ID NO: 655 - protein, 31 aa, synthetic construct; identical to SEQ ID NO: 21
  REGION 1..31: note = Description of Artificial Sequence: Syntheticpolypeptide

SEQ ID NO: 656 - protein, 31 aa, synthetic construct; identical to SEQ ID NO: 21
  REGION 1..31: note = Description of Artificial Sequence: Syntheticpolypeptide

SEQ ID NO: 657 - protein, 31 aa, synthetic construct; identical to SEQ ID NO: 21
  REGION 1..31: note = Description of Artificial Sequence: Syntheticpolypeptide

SEQ ID NO: 658 - protein, 31 aa, synthetic construct; identical to SEQ ID NO: 21
  REGION 1..31: note = Description of Artificial Sequence: Syntheticpolypeptide

SEQ ID NO: 659 - protein, 31 aa, synthetic construct; identical to SEQ ID NO: 21
  REGION 1..31: note = Description of Artificial Sequence: Syntheticpolypeptide

SEQ ID NO: 660 - protein, 31 aa, synthetic construct; identical to SEQ ID NO: 21
  REGION 1..31: note = Description of Artificial Sequence: Syntheticpolypeptide

SEQ ID NO: 661 - protein, 31 aa, synthetic construct; identical to SEQ ID NO: 21
  REGION 1..31: note = Description of Artificial Sequence: Syntheticpolypeptide

SEQ ID NO: 662 - protein, 31 aa, synthetic construct; identical to SEQ ID NO: 21
  REGION 1..31: note = Description of Artificial Sequence: Syntheticpolypeptide

SEQ ID NO: 663 - protein, 31 aa, synthetic construct; identical to SEQ ID NO: 21
  REGION 1..31: note = Description of Artificial Sequence: Syntheticpolypeptide

SEQ ID NO: 664 - protein, 31 aa, synthetic construct; identical to SEQ ID NO: 21
  REGION 1..31: note = Description of Artificial Sequence: Syntheticpolypeptide

SEQ ID NO: 665 - protein, 31 aa, synthetic construct; identical to SEQ ID NO: 21
  REGION 1..31: note = Description of Artificial Sequence: Syntheticpolypeptide

SEQ ID NO: 666 - protein, 31 aa, synthetic construct; identical to SEQ ID NO: 21
  REGION 1..31: note = Description of Artificial Sequence: Syntheticpolypeptide

SEQ ID NO: 667 - protein, 31 aa, synthetic construct; identical to SEQ ID NO: 21
  REGION 1..31: note = Description of Artificial Sequence: Syntheticpolypeptide

SEQ ID NO: 668 - protein, 31 aa, synthetic construct; identical to SEQ ID NO: 21
  REGION 1..31: note = Description of Artificial Sequence: Syntheticpolypeptide

SEQ ID NO: 669 - protein, 31 aa, synthetic construct; identical to SEQ ID NO: 21
  REGION 1..31: note = Description of Artificial Sequence: Syntheticpolypeptide

SEQ ID NO: 670 - protein, 31 aa, synthetic construct; identical to SEQ ID NO: 21
  REGION 1..31: note = Description of Artificial Sequence: Syntheticpolypeptide

SEQ ID NO: 671 - protein, 31 aa, synthetic construct; identical to SEQ ID NO: 21
  REGION 1..31: note = Description of Artificial Sequence: Syntheticpolypeptide

SEQ ID NO: 672 - protein, 31 aa, synthetic construct; identical to SEQ ID NO: 21
  REGION 1..31: note = Description of Artificial Sequence: Syntheticpolypeptide

SEQ ID NO: 673 - protein, 31 aa, synthetic construct; identical to SEQ ID NO: 21
  REGION 1..31: note = Description of Artificial Sequence: Syntheticpolypeptide

SEQ ID NO: 674 - protein, 31 aa, synthetic construct; identical to SEQ ID NO: 21
  REGION 1..31: note = Description of Artificial Sequence: Syntheticpolypeptide

SEQ ID NO: 675 - protein, 31 aa, synthetic construct; identical to SEQ ID NO: 21
  REGION 1..31: note = Description of Artificial Sequence: Syntheticpolypeptide

SEQ ID NO: 676 - protein, 31 aa, synthetic construct; identical to SEQ ID NO: 21
  REGION 1..31: note = Description of Artificial Sequence: Syntheticpolypeptide

SEQ ID NO: 677 - protein, 31 aa, synthetic construct; identical to SEQ ID NO: 21
  REGION 1..31: note = Description of Artificial Sequence: Syntheticpolypeptide

SEQ ID NO: 678 - protein, 31 aa, synthetic construct; identical to SEQ ID NO: 21
  REGION 1..31: note = Description of Artificial Sequence: Syntheticpolypeptide

SEQ ID NO: 679 - protein, 31 aa, synthetic construct; identical to SEQ ID NO: 21
  REGION 1..31: note = Description of Artificial Sequence: Syntheticpolypeptide

SEQ ID NO: 680 - protein, 31 aa, synthetic construct; identical to SEQ ID NO: 21
  REGION 1..31: note = Description of Artificial Sequence: Syntheticpolypeptide

SEQ ID NO: 681 - protein, 31 aa, synthetic construct; identical to SEQ ID NO: 21
  REGION 1..31: note = Description of Artificial Sequence: Syntheticpolypeptide

SEQ ID NO: 682 - protein, 31 aa, synthetic construct; identical to SEQ ID NO: 21
  REGION 1..31: note = Description of Artificial Sequence: Syntheticpolypeptide

SEQ ID NO: 683 - protein, 31 aa, synthetic construct; identical to SEQ ID NO: 21
  REGION 1..31: note = Description of Artificial Sequence: Syntheticpolypeptide

SEQ ID NO: 684 - protein, 31 aa, synthetic construct; identical to SEQ ID NO: 21
  REGION 1..31: note = Description of Artificial Sequence: Syntheticpolypeptide

SEQ ID NO: 685 - protein, 31 aa, synthetic construct; identical to SEQ ID NO: 21
  REGION 1..31: note = Description of Artificial Sequence: Syntheticpolypeptide

SEQ ID NO: 686 - protein, 31 aa, synthetic construct; identical to SEQ ID NO: 21
  REGION 1..31: note = Description of Artificial Sequence: Syntheticpolypeptide

SEQ ID NO: 687 - protein, 31 aa, synthetic construct; identical to SEQ ID NO: 21
  REGION 1..31: note = Description of Artificial Sequence: Syntheticpolypeptide

SEQ ID NO: 688 - protein, 31 aa, synthetic construct; identical to SEQ ID NO: 21
  REGION 1..31: note = Description of Artificial Sequence: Syntheticpolypeptide

SEQ ID NO: 689 - protein, 31 aa, synthetic construct; identical to SEQ ID NO: 21
  REGION 1..31: note = Description of Artificial Sequence: Syntheticpolypeptide

SEQ ID NO: 690 - protein, 31 aa, synthetic construct; identical to SEQ ID NO: 21
  REGION 1..31: note = Description of Artificial Sequence: Syntheticpolypeptide

SEQ ID NO: 691 - protein, 31 aa, synthetic construct; identical to SEQ ID NO: 21
  REGION 1..31: note = Description of Artificial Sequence: Syntheticpolypeptide

SEQ ID NO: 692 - protein, 31 aa, synthetic construct; identical to SEQ ID NO: 21
  REGION 1..31: note = Description of Artificial Sequence: Syntheticpolypeptide

SEQ ID NO: 693 - protein, 31 aa, synthetic construct; identical to SEQ ID NO: 21
  REGION 1..31: note = Description of Artificial Sequence: Syntheticpolypeptide

SEQ ID NO: 694 - protein, 31 aa, synthetic construct; identical to SEQ ID NO: 21
  REGION 1..31: note = Description of Artificial Sequence: Syntheticpolypeptide

SEQ ID NO: 695 - protein, 31 aa, synthetic construct; identical to SEQ ID NO: 21
  REGION 1..31: note = Description of Artificial Sequence: Syntheticpolypeptide

SEQ ID NO: 696 - protein, 31 aa, synthetic construct; identical to SEQ ID NO: 21
  REGION 1..31: note = Description of Artificial Sequence: Syntheticpolypeptide

SEQ ID NO: 697 - protein, 31 aa, synthetic construct; identical to SEQ ID NO: 21
  REGION 1..31: note = Description of Artificial Sequence: Syntheticpolypeptide

SEQ ID NO: 698 - protein, 31 aa, synthetic construct; identical to SEQ ID NO: 21
  REGION 1..31: note = Description of Artificial Sequence: Syntheticpolypeptide

SEQ ID NO: 699 - protein, 31 aa, synthetic construct; identical to SEQ ID NO: 21
  REGION 1..31: note = Description of Artificial Sequence: Syntheticpolypeptide

SEQ ID NO: 700 - protein, 31 aa, synthetic construct; identical to SEQ ID NO: 21
  REGION 1..31: note = Description of Artificial Sequence: Syntheticpolypeptide

SEQ ID NO: 701 - protein, 31 aa, synthetic construct
  REGION 1..31: note = Description of Artificial Sequence: Syntheticpolypeptide
TSSYCCRSGSCPSSDTSYCNGQFKSYYYMDP

SEQ ID NO: 702 - protein, 31 aa, synthetic construct
  REGION 1..31: note = Description of Artificial Sequence: Syntheticpolypeptide
TSSFCCRSGSCPSSDTSYCNGQYKSYYYVNI

SEQ ID NO: 703 - protein, 31 aa, synthetic construct
  REGION 1..31: note = Description of Artificial Sequence: Syntheticpolypeptide
TTSFCCRGASCPSHDTSYCAGSYKSYYYVNI

SEQ ID NO: 704 - protein, 31 aa, synthetic construct
  REGION 1..31: note = Description of Artificial Sequence: Syntheticpolypeptide
TSAFCCRGKSCPSSDTSYCGGQYPSYYYVNI

SEQ ID NO: 705 - protein, 31 aa, synthetic construct
  REGION 1..31: note = Description of Artificial Sequence: Syntheticpolypeptide
TSAFCCRGKSCPSHDTSFCGGQDKRYYYVNI

SEQ ID NO: 706 - protein, 31 aa, synthetic construct
  REGION 1..31: note = Description of Artificial Sequence: Syntheticpolypeptide
TSAFCCRGGNCPSHETSYCNGQNKQYYYMDV

SEQ ID NO: 707 - protein, 31 aa, synthetic construct
  REGION 1..31: note = Description of Artificial Sequence: Syntheticpolypeptide
TSSFCCRGNQCPSSDTSFCGGQDKRYYYMDP

SEQ ID NO: 708 - protein, 31 aa, synthetic construct
  REGION 1..31: note = Description of Artificial Sequence: Syntheticpolypeptide
TTSFCCRGNQCPSHETSYCGGYYKSYFYMDV

SEQ ID NO: 709 - protein, 31 aa, synthetic construct
  REGION 1..31: note = Description of Artificial Sequence: Syntheticpolypeptide
TSSYCCRGKQCPSHDTSYCAGQYADYYYMDV

SEQ ID NO: 710 - protein, 31 aa, synthetic construct
  REGION 1..31: note = Description of Artificial Sequence: Syntheticpolypeptide
ISSFCCRGKQCPSSDTSYCNGQYADYYYMDV

SEQ ID NO: 711 - protein, 31 aa, synthetic construct
  REGION 1..31: note = Description of Artificial Sequence: Syntheticpolypeptide
TSSFCCRGKQCPSSDTSYCNGQYADYYYVNI

SEQ ID NO: 712 - protein, 31 aa, synthetic construct
  REGION 1..31: note = Description of Artificial Sequence: Syntheticpolypeptide
ISSFCCRGKQCPSSDTSFCGGQDKRYYFMDV

SEQ ID NO: 713 - protein, 31 aa, synthetic construct
  REGION 1..31: note = Description of Artificial Sequence: Syntheticpolypeptide
TSAFCCRGKQCPSSDTSYCGGQYASFYYMDV

SEQ ID NO: 714 - protein, 31 aa, synthetic construct
  REGION 1..31: note = Description of Artificial Sequence: Syntheticpolypeptide
TSSFCCQGNNCPSSDTSYCGGYYKDYYYMDV

SEQ ID NO: 715 - protein, 31 aa, synthetic construct
  REGION 1..31: note = Description of Artificial Sequence: Syntheticpolypeptide
TSSFCCQGNNCPSHDTSYCGGQYKSYYYVNI

SEQ ID NO: 716 - protein, 31 aa, synthetic construct
  REGION 1..31: note = Description of Artificial Sequence: Syntheticpolypeptide
TSSFCCQGKNCPSHETSYCGGQYADYYYMDV

SEQ ID NO: 717 - protein, 31 aa, synthetic construct
  REGION 1..31: note = Description of Artificial Sequence: Syntheticpolypeptide
TTSFCCHGNSCPSSDTSYCGGQNKQYYYMDV

SEQ ID NO: 718 - protein, 31 aa, synthetic construct
  REGION 1..31: note = Description of Artificial Sequence: Syntheticpolypeptide
ISSFCCHGNSCPSHDTSYCNGQNKQYYYMDV

SEQ ID NO: 719 - protein, 31 aa, synthetic construct
  REGION 1..31: note = Description of Artificial Sequence: Syntheticpolypeptide
ISSFCCHSNNCPSSDTSYCNGQYKQYYYMDV

SEQ ID NO: 720 - protein, 31 aa, synthetic construct
  REGION 1..31: note = Description of Artificial Sequence: Syntheticpolypeptide
TSSFCCHSNNCPSHDTSYCGGQYKSYYYVNI

SEQ ID NO: 721 - protein, 31 aa, synthetic construct
  REGION 1..31: note = Description of Artificial Sequence: Syntheticpolypeptide
ISSFACHSNNCPSSDTSYVNGYYKQYYFMDV

SEQ ID NO: 722 - protein, 31 aa, synthetic construct
  REGION 1..31: note = Description of Artificial Sequence: Syntheticpolypeptide
TSSFCCHSNNCPSSDTSYCNGQYKQYYYVNI

SEQ ID NO: 723 - protein, 31 aa, synthetic construct
  REGION 1..31: note = Description of Artificial Sequence: Syntheticpolypeptide
TSSFCCLGKACLSHDTSYCGGQYASYYYVNI

SEQ ID NO: 724 - protein, 31 aa, synthetic construct
  REGION 1..31: note = Description of Artificial Sequence: Syntheticpolypeptide
TSSFCCLGKACLSSDTSYCGGYYASYYFVNI

SEQ ID NO: 725 - protein, 31 aa, synthetic construct
  REGION 1..31: note = Description of Artificial Sequence: Syntheticpolypeptide
TSSFACLGKACLSSDTSYVGGYYASYYFVNI

SEQ ID NO: 726 - protein, 31 aa, synthetic construct
  REGION 1..31: note = Description of Artificial Sequence: Syntheticpolypeptide
TSSYCCLGNSCPSSDTSYCGGQFKSYYYMDP

SEQ ID NO: 727 - protein, 31 aa, synthetic construct
  REGION 1..31: note = Description of Artificial Sequence: Syntheticpolypeptide
TSSYCCLGNSCPSSDTSFCGGQDKRYYYMDP

SEQ ID NO: 728 - protein, 31 aa, synthetic construct
  REGION 1..31: note = Description of Artificial Sequence: Syntheticpolypeptide
ISSFCCLGGNCPSSETSYCGNQYPSYYYMDV

SEQ ID NO: 729 - protein, 31 aa, synthetic construct
  REGION 1..31: note = Description of Artificial Sequence: Syntheticpolypeptide
ISSFCCLGGNCPSSETSYCGNYYPSYFYMDV

SEQ ID NO: 730 - protein, 31 aa, synthetic construct
  REGION 1..31: note = Description of Artificial Sequence: Syntheticpolypeptide
TSSFCCLGGNCPSSETSYCGNQYPSYYYVNI

SEQ ID NO: 731 - protein, 31 aa, synthetic construct
  REGION 1..31: note = Description of Artificial Sequence: Syntheticpolypeptide
TTSFACRGNQCPSHETSYVGGYYKSYFYMDV

SEQ ID NO: 732 - protein, 31 aa, synthetic construct
  REGION 1..31: note = Description of Artificial Sequence: Syntheticpolypeptide
TTSFACRGNQCPSSETSYVGGYYKSYFFMDV

SEQ ID NO: 733 - protein, 31 aa, synthetic construct
  REGION 1..31: note = Description of Artificial Sequence: Syntheticpolypeptide
ISSFACRGKQCPSSDTSYVGGQFKSYYFMDV

SEQ ID NO: 734 - protein, 31 aa, synthetic construct
  REGION 1..31: note = Description of Artificial Sequence: Syntheticpolypeptide
TSSFCCRGGSCLSHDTSYCGGQYKSYYWMDV

SEQ ID NO: 735 - protein, 31 aa, synthetic construct; identical to SEQ ID NO: 639
  REGION 1..31: note = Description of Artificial Sequence: Syntheticpolypeptide

SEQ ID NO: 736 - protein, 31 aa, synthetic construct; identical to SEQ ID NO: 44
  REGION 1..31: note = Description of Artificial Sequence: Syntheticpolypeptide

SEQ ID NO: 737 - protein, 31 aa, synthetic construct; identical to SEQ ID NO: 637
  REGION 1..31: note = Description of Artificial Sequence: Syntheticpolypeptide

SEQ ID NO: 738 - protein, 31 aa, synthetic construct; identical to SEQ ID NO: 639
  REGION 1..31: note = Description of Artificial Sequence: Syntheticpolypeptide

SEQ ID NO: 739 - protein, 31 aa, synthetic construct
  REGION 1..31: note = Description of Artificial Sequence: Syntheticpolypeptide
TSSFCCRGKSCPSHDTSYCGGQYASYYYMDV

SEQ ID NO: 740 - protein, 31 aa, synthetic construct; identical to SEQ ID NO: 45
  REGION 1..31: note = Description of Artificial Sequence: Syntheticpolypeptide

SEQ ID NO: 741 - protein, 31 aa, synthetic construct; identical to SEQ ID NO: 20
  REGION 1..31: note = Description of Artificial Sequence: Syntheticpolypeptide

SEQ ID NO: 742 - protein, 31 aa, synthetic construct; identical to SEQ ID NO: 46
  REGION 1..31: note = Description of Artificial Sequence: Syntheticpolypeptide

SEQ ID NO: 743 - protein, 31 aa, synthetic construct; identical to SEQ ID NO: 47
  REGION 1..31: note = Description of Artificial Sequence: Syntheticpolypeptide

SEQ ID NO: 744 - protein, 31 aa, synthetic construct; identical to SEQ ID NO: 27
  REGION 1..31: note = Description of Artificial Sequence: Syntheticpolypeptide

SEQ ID NO: 745 - protein, 31 aa, synthetic construct; identical to SEQ ID NO: 21
  REGION 1..31: note = Description of Artificial Sequence: Syntheticpolypeptide

SEQ ID NO: 746 - protein, 31 aa, synthetic construct; identical to SEQ ID NO: 21
  REGION 1..31: note = Description of Artificial Sequence: Syntheticpolypeptide

SEQ ID NO: 747 - protein, 31 aa, synthetic construct; identical to SEQ ID NO: 739
  REGION 1..31: note = Description of Artificial Sequence: Syntheticpolypeptide

SEQ ID NO: 748 - protein, 31 aa, synthetic construct
  REGION 1..31: note = Description of Artificial Sequence: Syntheticpolypeptide
TSSFCCRSGSCPSSDTSYCNGQYKSYYWMDV

SEQ ID NO: 749 - protein, 31 aa, synthetic construct; identical to SEQ ID NO: 37
  REGION 1..31: note = Description of Artificial Sequence: Syntheticpolypeptide

SEQ ID NO: 750 - protein, 31 aa, synthetic construct
  REGION 1..31: note = Description of Artificial Sequence: Syntheticpolypeptide
TSSFCCRGGSCPSRDTSYCGGQYKSYYFMDV

SEQ ID NO: 751 - protein, 13 aa, synthetic construct
  REGION 1..13: note = Description of Artificial Sequence: Syntheticpeptide
SGSSSNIGSSSVS

SEQ ID NO: 752 - protein, 13 aa, synthetic construct
  REGION 1..13: note = Description of Artificial Sequence: Syntheticpeptide
SGSSSNIGSSSVS

SEQ ID NO: 753 - protein, 13 aa, synthetic construct
  REGION 1..13: note = Description of Artificial Sequence: Syntheticpeptide
SGSSSNIGSSSVS

SEQ ID NO: 754 - protein, 13 aa, synthetic construct
  REGION 1..13: note = Description of Artificial Sequence: Syntheticpeptide
SGSSSNIGSSSVS

SEQ ID NO: 755 - protein, 13 aa, synthetic construct
  REGION 1..13: note = Description of Artificial Sequence: Syntheticpeptide
SGSSSNIGSSSVS

SEQ ID NO: 756 - protein, 13 aa, synthetic construct
  REGION 1..13: note = Description of Artificial Sequence: Syntheticpeptide
SGSSSNIGSSSVS

SEQ ID NO: 757 - protein, 13 aa, synthetic construct
  REGION 1..13: note = Description of Artificial Sequence: Syntheticpeptide
SGSSSNIGSSSVS

SEQ ID NO: 758 - protein, 13 aa, synthetic construct
  REGION 1..13: note = Description of Artificial Sequence: Syntheticpeptide
SGSSSNIGSSSVS

SEQ ID NO: 759 - protein, 13 aa, synthetic construct
  REGION 1..13: note = Description of Artificial Sequence: Syntheticpeptide
SGSSSNIGSSSVS

SEQ ID NO: 760 - protein, 13 aa, synthetic construct
  REGION 1..13: note = Description of Artificial Sequence: Syntheticpeptide
SGSSSNIGSSSVS

SEQ ID NO: 761 - protein, 13 aa, synthetic construct
  REGION 1..13: note = Description of Artificial Sequence: Syntheticpeptide
SGSSSNIGSSSVS

SEQ ID NO: 762 - protein, 13 aa, synthetic construct
  REGION 1..13: note = Description of Artificial Sequence: Syntheticpeptide
SGSSSNIGSSSVS

SEQ ID NO: 763 - protein, 13 aa, synthetic construct
  REGION 1..13: note = Description of Artificial Sequence: Syntheticpeptide
SGSSSNIGSSSVS

SEQ ID NO: 764 - protein, 13 aa, synthetic construct
  REGION 1..13: note = Description of Artificial Sequence: Syntheticpeptide
SGSSSNIGSSSVS

SEQ ID NO: 765 - protein, 13 aa, synthetic construct
  REGION 1..13: note = Description of Artificial Sequence: Syntheticpeptide
SGSSSNIGSSSVS

SEQ ID NO: 766 - protein, 13 aa, synthetic construct
  REGION 1..13: note = Description of Artificial Sequence: Syntheticpeptide
SGSSSNIGSSSVS

SEQ ID NO: 767 - protein, 13 aa, synthetic construct
  REGION 1..13: note = Description of Artificial Sequence: Syntheticpeptide
SGSSSNIGSSSVS

SEQ ID NO: 768 - protein, 13 aa, synthetic construct
  REGION 1..13: note = Description of Artificial Sequence: Syntheticpeptide
SGSSSNIGSSSVS

SEQ ID NO: 769 - protein, 13 aa, synthetic construct
  REGION 1..13: note = Description of Artificial Sequence: Syntheticpeptide
SGSSSNIGSSSVS

SEQ ID NO: 770 - protein, 13 aa, synthetic construct
  REGION 1..13: note = Description of Artificial Sequence: Syntheticpeptide
SGSSSNIGSSSVS

SEQ ID NO: 771 - protein, 13 aa, synthetic construct
  REGION 1..13: note = Description of Artificial Sequence: Syntheticpeptide
SGSSSNIGSSSVS

SEQ ID NO: 772 - protein, 13 aa, synthetic construct
  REGION 1..13: note = Description of Artificial Sequence: Syntheticpeptide
SGSSSNIGSSSVS

SEQ ID NO: 773 - protein, 13 aa, synthetic construct
  REGION 1..13: note = Description of Artificial Sequence: Syntheticpeptide
SGSSSNIGSSSVS

SEQ ID NO: 774 - protein, 13 aa, synthetic construct
  REGION 1..13: note = Description of Artificial Sequence: Syntheticpeptide
SGSSSNIGSSSVS

SEQ ID NO: 775 - protein, 13 aa, synthetic construct
  REGION 1..13: note = Description of Artificial Sequence: Syntheticpeptide
SGSSSNIGSSSVS

SEQ ID NO: 776 - protein, 13 aa, synthetic construct
  REGION 1..13: note = Description of Artificial Sequence: Syntheticpeptide
SGSSSNIGSSSVS

SEQ ID NO: 777 - protein, 13 aa, synthetic construct
  REGION 1..13: note = Description of Artificial Sequence: Syntheticpeptide
SGSSSNIGSSSVS

SEQ ID NO: 778 - protein, 13 aa, synthetic construct
  REGION 1..13: note = Description of Artificial Sequence: Syntheticpeptide
SGSSSNIGSSSVS

SEQ ID NO: 779 - protein, 13 aa, synthetic construct
  REGION 1..13: note = Description of Artificial Sequence: Syntheticpeptide
SGSSSNIGSSSVS

SEQ ID NO: 780 - protein, 13 aa, synthetic construct
  REGION 1..13: note = Description of Artificial Sequence: Syntheticpeptide
SGSSSNIGSSSVS

SEQ ID NO: 781 - protein, 13 aa, synthetic construct
  REGION 1..13: note = Description of Artificial Sequence: Syntheticpeptide
SGSSSNIGSSSVS

SEQ ID NO: 782 - protein, 13 aa, synthetic construct
  REGION 1..13: note = Description of Artificial Sequence: Syntheticpeptide
SGSSSNIGSSSVS

SEQ ID NO: 783 - protein, 13 aa, synthetic construct
  REGION 1..13: note = Description of Artificial Sequence: Syntheticpeptide
SGSSSNIGSSSVS

SEQ ID NO: 784 - protein, 13 aa, synthetic construct
  REGION 1..13: note = Description of Artificial Sequence: Syntheticpeptide
SGSSSNIGSSSVS

SEQ ID NO: 785 - protein, 13 aa, synthetic construct
  REGION 1..13: note = Description of Artificial Sequence: Syntheticpeptide
SGSSSNIGSSSVS

SEQ ID NO: 786 - protein, 13 aa, synthetic construct
  REGION 1..13: note = Description of Artificial Sequence: Syntheticpeptide
SGSSSNIGSSSVS

SEQ ID NO: 787 - protein, 13 aa, synthetic construct
  REGION 1..13: note = Description of Artificial Sequence: Syntheticpeptide
SGSSSNIGSSSVS

SEQ ID NO: 788 - protein, 13 aa, synthetic construct
  REGION 1..13: note = Description of Artificial Sequence: Syntheticpeptide
SGSSSNIGSSSVS

SEQ ID NO: 789 - protein, 13 aa, synthetic construct
  REGION 1..13: note = Description of Artificial Sequence: Syntheticpeptide
SGSSSNIGSSSVS

SEQ ID NO: 790 - protein, 13 aa, synthetic construct
  REGION 1..13: note = Description of Artificial Sequence: Syntheticpeptide
SGSSSNIGSSSVS

SEQ ID NO: 791 - protein, 13 aa, synthetic construct
  REGION 1..13: note = Description of Artificial Sequence: Syntheticpeptide
SGSSSNIGSSSVS

SEQ ID NO: 792 - protein, 13 aa, synthetic construct
  REGION 1..13: note = Description of Artificial Sequence: Syntheticpeptide
SGSSSNIGSSSVS

SEQ ID NO: 793 - protein, 13 aa, synthetic construct
  REGION 1..13: note = Description of Artificial Sequence: Syntheticpeptide
SGSSSNIGSSSVS

SEQ ID NO: 794 - protein, 13 aa, synthetic construct
  REGION 1..13: note = Description of Artificial Sequence: Syntheticpeptide
SGSSSNIGSSSVS

SEQ ID NO: 795 - protein, 13 aa, synthetic construct
  REGION 1..13: note = Description of Artificial Sequence: Syntheticpeptide
SGSSSNIGSSSVS

SEQ ID NO: 796 - protein, 13 aa, synthetic construct
  REGION 1..13: note = Description of Artificial Sequence: Syntheticpeptide
SGSSSNIGSSSVS

SEQ ID NO: 797 - protein, 13 aa, synthetic construct
  REGION 1..13: note = Description of Artificial Sequence: Syntheticpeptide
SGSSSNIGSSSVS

SEQ ID NO: 798 - protein, 13 aa, synthetic construct
  REGION 1..13: note = Description of Artificial Sequence: Syntheticpeptide
SGSSSNIGSSSVS

SEQ ID NO: 799 - protein, 13 aa, synthetic construct
  REGION 1..13: note = Description of Artificial Sequence: Syntheticpeptide
SGSSSNIGSSSVS

SEQ ID NO: 800 - protein, 13 aa, synthetic construct
  REGION 1..13: note = Description of Artificial Sequence: Syntheticpeptide
SGSSSNIGSSSVS

SEQ ID NO: 801 - protein, 13 aa, synthetic construct
  REGION 1..13: note = Description of Artificial Sequence: Syntheticpeptide
SGSSSNIGSSSVS

SEQ ID NO: 802 - protein, 13 aa, synthetic construct
  REGION 1..13: note = Description of Artificial Sequence: Syntheticpeptide
SGSSSNIGSSSVS

SEQ ID NO: 803 - protein, 13 aa, synthetic construct
  REGION 1..13: note = Description of Artificial Sequence: Syntheticpeptide
SGSSSNIGSSSVS

SEQ ID NO: 804 - protein, 13 aa, synthetic construct
  REGION 1..13: note = Description of Artificial Sequence: Syntheticpeptide
SGSSSNIGSSSVS

SEQ ID NO: 805 - protein, 13 aa, synthetic construct
  REGION 1..13: note = Description of Artificial Sequence: Syntheticpeptide
SGSSSNIGSSSVS

SEQ ID NO: 806 - protein, 13 aa, synthetic construct
  REGION 1..13: note = Description of Artificial Sequence: Syntheticpeptide
SGSSSNIGSSSVS

SEQ ID NO: 807 - protein, 13 aa, synthetic construct
  REGION 1..13: note = Description of Artificial Sequence: Syntheticpeptide
SGSSSNIGSSSVS

SEQ ID NO: 808 - protein, 13 aa, synthetic construct
  REGION 1..13: note = Description of Artificial Sequence: Syntheticpeptide
SGSSSNIGSSSVS

SEQ ID NO: 809 - protein, 13 aa, synthetic construct
  REGION 1..13: note = Description of Artificial Sequence: Syntheticpeptide
SGSSSNIGSSSVS

SEQ ID NO: 810 - protein, 13 aa, synthetic construct
  REGION 1..13: note = Description of Artificial Sequence: Syntheticpeptide
SGSSSNIGSSSVS

SEQ ID NO: 811 - protein, 13 aa, synthetic construct
  REGION 1..13: note = Description of Artificial Sequence: Syntheticpeptide
SGSSSNIGSSSVS

SEQ ID NO: 812 - protein, 13 aa, synthetic construct
  REGION 1..13: note = Description of Artificial Sequence: Syntheticpeptide
SGSSSNIGSSSVS

SEQ ID NO: 813 - protein, 13 aa, synthetic construct
  REGION 1..13: note = Description of Artificial Sequence: Syntheticpeptide
SGSSSNIGSSSVS

SEQ ID NO: 814 - protein, 13 aa, synthetic construct
  REGION 1..13: note = Description of Artificial Sequence: Syntheticpeptide
SGSSSNIGSSSVS

SEQ ID NO: 815 - protein, 13 aa, synthetic construct
  REGION 1..13: note = Description of Artificial Sequence: Syntheticpeptide
SGSSSNIGSSSVS

SEQ ID NO: 816 - protein, 13 aa, synthetic construct
  REGION 1..13: note = Description of Artificial Sequence: Syntheticpeptide
SGSSSNIGSSSVS

SEQ ID NO: 817 - protein, 13 aa, synthetic construct
  REGION 1..13: note = Description of Artificial Sequence: Syntheticpeptide
SGSSSNIGSSSVS

SEQ ID NO: 818 - protein, 13 aa, synthetic construct
  REGION 1..13: note = Description of Artificial Sequence: Syntheticpeptide
SGSSSNIGSSSVS

SEQ ID NO: 819 - protein, 13 aa, synthetic construct
  REGION 1..13: note = Description of Artificial Sequence: Syntheticpeptide
SGSSSNIGSSSVS

SEQ ID NO: 820 - protein, 13 aa, synthetic construct
  REGION 1..13: note = Description of Artificial Sequence: Syntheticpeptide
SGSSSNIGSSSVS

SEQ ID NO: 821 - protein, 13 aa, synthetic construct
  REGION 1..13: note = Description of Artificial Sequence: Syntheticpeptide
SGSSSNIGSSSVS

SEQ ID NO: 822 - protein, 13 aa, synthetic construct
  REGION 1..13: note = Description of Artificial Sequence: Syntheticpeptide
SGSSSNIGSSSVS

SEQ ID NO: 823 - protein, 13 aa, synthetic construct
  REGION 1..13: note = Description of Artificial Sequence: Syntheticpeptide
SGSSSNIGSSSVS

SEQ ID NO: 824 - protein, 13 aa, synthetic construct
  REGION 1..13: note = Description of Artificial Sequence: Syntheticpeptide
SGSSSNIGSSSVS

SEQ ID NO: 825 - protein, 13 aa, synthetic construct
  REGION 1..13: note = Description of Artificial Sequence: Syntheticpeptide
SGSSSNIGSSSVS

SEQ ID NO: 826 - protein, 13 aa, synthetic construct
  REGION 1..13: note = Description of Artificial Sequence: Syntheticpeptide
SGSSSNIGSSSVS

SEQ ID NO: 827 - protein, 13 aa, synthetic construct
  REGION 1..13: note = Description of Artificial Sequence: Syntheticpeptide
SGSSSNIGSSSVS

SEQ ID NO: 828 - protein, 13 aa, synthetic construct
  REGION 1..13: note = Description of Artificial Sequence: Syntheticpeptide
SGSSSNIGSSSVS

SEQ ID NO: 829 - protein, 13 aa, synthetic construct
  REGION 1..13: note = Description of Artificial Sequence: Syntheticpeptide
SGSSSNIGSSSVS

SEQ ID NO: 830 - protein, 13 aa, synthetic construct
  REGION 1..13: note = Description of Artificial Sequence: Syntheticpeptide
SGSSSNIGSSSVS

SEQ ID NO: 831 - protein, 13 aa, synthetic construct
  REGION 1..13: note = Description of Artificial Sequence: Syntheticpeptide
SGSSSNIGSSSVS

SEQ ID NO: 832 - protein, 13 aa, synthetic construct
  REGION 1..13: note = Description of Artificial Sequence: Syntheticpeptide
SGSSSNIGSSSVS

SEQ ID NO: 833 - protein, 13 aa, synthetic construct
  REGION 1..13: note = Description of Artificial Sequence: Syntheticpeptide
SGSSSNIGSSSVS

SEQ ID NO: 834 - protein, 13 aa, synthetic construct
  REGION 1..13: note = Description of Artificial Sequence: Syntheticpeptide
SGSSSNIGSSSVS

SEQ ID NO: 835 - protein, 13 aa, synthetic construct
  REGION 1..13: note = Description of Artificial Sequence: Syntheticpeptide
SGSSSNIGSSSVS

SEQ ID NO: 836 - protein, 13 aa, synthetic construct
  REGION 1..13: note = Description of Artificial Sequence: Syntheticpeptide
SGSSSNIGSSSVS

SEQ ID NO: 837 - protein, 13 aa, synthetic construct
  REGION 1..13: note = Description of Artificial Sequence: Syntheticpeptide
TGSSSNIGSSSVS

SEQ ID NO: 838 - protein, 13 aa, synthetic construct
  REGION 1..13: note = Description of Artificial Sequence: Syntheticpeptide
SGSSTNIGSSSVS

SEQ ID NO: 839 - protein, 13 aa, synthetic construct
  REGION 1..13: note = Description of Artificial Sequence: Syntheticpeptide
SGSSSNIGSSSVS

SEQ ID NO: 840 - protein, 13 aa, synthetic construct
  REGION 1..13: note = Description of Artificial Sequence: Syntheticpeptide
TGSSSNIGSSSVS

SEQ ID NO: 841 - protein, 13 aa, synthetic construct
  REGION 1..13: note = Description of Artificial Sequence: Syntheticpeptide
SGASSNIGSSSVS

SEQ ID NO: 842 - protein, 13 aa, synthetic construct
  REGION 1..13: note = Description of Artificial Sequence: Syntheticpeptide
SGSPSNIGSSSVS

SEQ ID NO: 843 - protein, 13 aa, synthetic construct
  REGION 1..13: note = Description of Artificial Sequence: Syntheticpeptide
SGSKSNIGSSSVS

SEQ ID NO: 844 - protein, 13 aa, synthetic construct
  REGION 1..13: note = Description of Artificial Sequence: Syntheticpeptide
SGSSTNIGSSSVS

SEQ ID NO: 845 - protein, 13 aa, synthetic construct
  REGION 1..13: note = Description of Artificial Sequence: Syntheticpeptide
SGSSSDIGSSSVS

SEQ ID NO: 846 - protein, 13 aa, synthetic construct
  REGION 1..13: note = Description of Artificial Sequence: Syntheticpeptide
SGSSSNIQSSSVS

SEQ ID NO: 847 - protein, 13 aa, synthetic construct
  REGION 1..13: note = Description of Artificial Sequence: Syntheticpeptide
SGSSSNIGHSSVS

SEQ ID NO: 848 - protein, 13 aa, synthetic construct
  REGION 1..13: note = Description of Artificial Sequence: Syntheticpeptide
SGSSSNIGSTSVS

SEQ ID NO: 849 - protein, 13 aa, synthetic construct
  REGION 1..13: note = Description of Artificial Sequence: Syntheticpeptide
SGSSSNIGSNSVS

SEQ ID NO: 850 - protein, 13 aa, synthetic construct
  REGION 1..13: note = Description of Artificial Sequence: Syntheticpeptide
SGSSSNIGSASVS

SEQ ID NO: 851 - protein, 13 aa, synthetic construct
  REGION 1..13: note = Description of Artificial Sequence: Syntheticpeptide
SGSSSNIGSSTVS

SEQ ID NO: 852 - protein, 13 aa, synthetic construct
  REGION 1..13: note = Description of Artificial Sequence: Syntheticpeptide
SGSSSNIGSSAVS

SEQ ID NO: 853 - protein, 13 aa, synthetic construct
  REGION 1..13: note = Description of Artificial Sequence: Syntheticpeptide
SGSSSNIGSSYVS

SEQ ID NO: 854 - protein, 13 aa, synthetic construct
  REGION 1..13: note = Description of Artificial Sequence: Syntheticpeptide
SGSSSNIGSSSTS

SEQ ID NO: 855 - protein, 13 aa, synthetic construct
  REGION 1..13: note = Description of Artificial Sequence: Syntheticpeptide
SGSSSNIGSSSVA

SEQ ID NO: 856 - protein, 13 aa, synthetic construct
  REGION 1..13: note = Description of Artificial Sequence: Syntheticpeptide
SGSSSNIGSSSVT

SEQ ID NO: 857 - protein, 13 aa, synthetic construct
  REGION 1..13: note = Description of Artificial Sequence: Syntheticpeptide
SGSSSNIGSSSVS

SEQ ID NO: 858 - protein, 13 aa, synthetic construct
  REGION 1..13: note = Description of Artificial Sequence: Syntheticpeptide
SGSSSNIGSSSVS

SEQ ID NO: 859 - protein, 13 aa, synthetic construct
  REGION 1..13: note = Description of Artificial Sequence: Syntheticpeptide
SGSSSNIGSSSVS

SEQ ID NO: 860 - protein, 13 aa, synthetic construct
  REGION 1..13: note = Description of Artificial Sequence: Syntheticpeptide
SGSSSNIGSSSVS

SEQ ID NO: 861 - protein, 13 aa, synthetic construct
  REGION 1..13: note = Description of Artificial Sequence: Syntheticpeptide
SGSSSNIGSSSVS

SEQ ID NO: 862 - protein, 13 aa, synthetic construct
  REGION 1..13: note = Description of Artificial Sequence: Syntheticpeptide
SGSSSNIGSSSVS

SEQ ID NO: 863 - protein, 13 aa, synthetic construct
  REGION 1..13: note = Description of Artificial Sequence: Syntheticpeptide
SGSSSNIGSSSVS

SEQ ID NO: 864 - protein, 13 aa, synthetic construct
  REGION 1..13: note = Description of Artificial Sequence: Syntheticpeptide
SGSSSNIGSSSVS

SEQ ID NO: 865 - protein, 13 aa, synthetic construct
  REGION 1..13: note = Description of Artificial Sequence: Syntheticpeptide
SGSSSNIGSSSVS

SEQ ID NO: 866 - protein, 13 aa, synthetic construct
  REGION 1..13: note = Description of Artificial Sequence: Syntheticpeptide
SGSSSNIGSSSVS

SEQ ID NO: 867 - protein, 13 aa, synthetic construct
  REGION 1..13: note = Description of Artificial Sequence: Syntheticpeptide
SGSSSNIGSSSVS

SEQ ID NO: 868 - protein, 13 aa, synthetic construct
  REGION 1..13: note = Description of Artificial Sequence: Syntheticpeptide
SGSSSNIGSSSVS

SEQ ID NO: 869 - protein, 13 aa, synthetic construct
  REGION 1..13: note = Description of Artificial Sequence: Syntheticpeptide
SGSSSNIGSSSVS

SEQ ID NO: 870 - protein, 13 aa, synthetic construct
  REGION 1..13: note = Description of Artificial Sequence: Syntheticpeptide
SGSSSNIGSSSVS

SEQ ID NO: 871 - protein, 13 aa, synthetic construct
  REGION 1..13: note = Description of Artificial Sequence: Syntheticpeptide
SGSSSNIGSSSVS

SEQ ID NO: 872 - protein, 13 aa, synthetic construct
  REGION 1..13: note = Description of Artificial Sequence: Syntheticpeptide
SGSSSNIGSSSVS

SEQ ID NO: 873 - protein, 13 aa, synthetic construct
  REGION 1..13: note = Description of Artificial Sequence: Syntheticpeptide
SGSSSNIGSSSVS

SEQ ID NO: 874 - protein, 13 aa, synthetic construct
  REGION 1..13: note = Description of Artificial Sequence: Syntheticpeptide
SGSSSNIGSSSVS

SEQ ID NO: 875 - protein, 13 aa, synthetic construct
  REGION 1..13: note = Description of Artificial Sequence: Syntheticpeptide
SGSSSNIGSSSVS

SEQ ID NO: 876 - protein, 13 aa, synthetic construct
  REGION 1..13: note = Description of Artificial Sequence: Syntheticpeptide
SGSSSNIGSSSVS

SEQ ID NO: 877 - protein, 13 aa, synthetic construct
  REGION 1..13: note = Description of Artificial Sequence: Syntheticpeptide
SGSSSNIGSSSVS

SEQ ID NO: 878 - protein, 13 aa, synthetic construct
  REGION 1..13: note = Description of Artificial Sequence: Syntheticpeptide
SGSSSNIGSSSVS

SEQ ID NO: 879 - protein, 13 aa, synthetic construct
  REGION 1..13: note = Description of Artificial Sequence: Syntheticpeptide
SGSSSNIGSSSVS

SEQ ID NO: 880 - protein, 13 aa, synthetic construct
  REGION 1..13: note = Description of Artificial Sequence: Syntheticpeptide
SGSSSNIGSSSVS

SEQ ID NO: 881 - protein, 13 aa, synthetic construct
  REGION 1..13: note = Description of Artificial Sequence: Syntheticpeptide
SGSSSNIGSSSVS

SEQ ID NO: 882 - protein, 13 aa, synthetic construct
  REGION 1..13: note = Description of Artificial Sequence: Syntheticpeptide
SGSSSNIGSSSVS

SEQ ID NO: 883 - protein, 13 aa, synthetic construct
  REGION 1..13: note = Description of Artificial Sequence: Syntheticpeptide
SGSSSNIGSSSVS

SEQ ID NO: 884 - protein, 13 aa, synthetic construct
  REGION 1..13: note = Description of Artificial Sequence: Syntheticpeptide
SGSSSNIGSSSVS

SEQ ID NO: 885 - protein, 13 aa, synthetic construct
  REGION 1..13: note = Description of Artificial Sequence: Syntheticpeptide
SGSSSNIGSSSVS

SEQ ID NO: 886 - protein, 13 aa, synthetic construct
  REGION 1..13: note = Description of Artificial Sequence: Syntheticpeptide
SGSSSNIGSSSVS

SEQ ID NO: 887 - protein, 13 aa, synthetic construct
  REGION 1..13: note = Description of Artificial Sequence: Syntheticpeptide
SGSSSNIGSSSVS

SEQ ID NO: 888 - protein, 13 aa, synthetic construct
  REGION 1..13: note = Description of Artificial Sequence: Syntheticpeptide
SGSSSNIGSSSVS

SEQ ID NO: 889 - protein, 13 aa, synthetic construct
  REGION 1..13: note = Description of Artificial Sequence: Syntheticpeptide
SGSSSDIGSSSVS

SEQ ID NO: 890 - protein, 13 aa, synthetic construct
  REGION 1..13: note = Description of Artificial Sequence: Syntheticpeptide
HGSESDIGSHDVL

SEQ ID NO: 891 - protein, 13 aa, synthetic construct
  REGION 1..13: note = Description of Artificial Sequence: Syntheticpeptide
SGSSSNIGSSSVS

SEQ ID NO: 892 - protein, 13 aa, synthetic construct
  REGION 1..13: note = Description of Artificial Sequence: Syntheticpeptide
SGSSSNIGSSSVS

SEQ ID NO: 893 - protein, 13 aa, synthetic construct
  REGION 1..13: note = Description of Artificial Sequence: Syntheticpeptide
SGSSSNIGSSSVS

SEQ ID NO: 894 - protein, 13 aa, synthetic construct
  REGION 1..13: note = Description of Artificial Sequence: Syntheticpeptide
SGSSSNIGSSSVS

SEQ ID NO: 895 - protein, 13 aa, synthetic construct
  REGION 1..13: note = Description of Artificial Sequence: Syntheticpeptide
SGSSSNIGSSSVS

SEQ ID NO: 896 - protein, 13 aa, synthetic construct
  REGION 1..13: note = Description of Artificial Sequence: Syntheticpeptide
SGSSSNIGSSSVS

SEQ ID NO: 897 - protein, 13 aa, synthetic construct
  REGION 1..13: note = Description of Artificial Sequence: Syntheticpeptide
SGSSSNIGSSSVS

SEQ ID NO: 898 - protein, 13 aa, synthetic construct
  REGION 1..13: note = Description of Artificial Sequence: Syntheticpeptide
SGSSSNIGSSSVS

SEQ ID NO: 899 - protein, 13 aa, synthetic construct
  REGION 1..13: note = Description of Artificial Sequence: Syntheticpeptide
SGSSSNIGSSSVS

SEQ ID NO: 900 - protein, 13 aa, synthetic construct
  REGION 1..13: note = Description of Artificial Sequence: Syntheticpeptide
SGSSSNIGSSSVS

SEQ ID NO: 901 - protein, 13 aa, synthetic construct
  REGION 1..13: note = Description of Artificial Sequence: Syntheticpeptide
SGSSSNIGSSSVS

SEQ ID NO: 902 - protein, 13 aa, synthetic construct
  REGION 1..13: note = Description of Artificial Sequence: Syntheticpeptide
SGSSSNIGSSSVS

SEQ ID NO: 903 - protein, 13 aa, synthetic construct
  REGION 1..13: note = Description of Artificial Sequence: Syntheticpeptide
SGSSSNIGSSSVS

SEQ ID NO: 904 - protein, 13 aa, synthetic construct
  REGION 1..13: note = Description of Artificial Sequence: Syntheticpeptide
SGSSSNIGSSSVS

SEQ ID NO: 905 - protein, 13 aa, synthetic construct
  REGION 1..13: note = Description of Artificial Sequence: Syntheticpeptide
SGSSSNIGSSSVS

SEQ ID NO: 906 - protein, 13 aa, synthetic construct
  REGION 1..13: note = Description of Artificial Sequence: Syntheticpeptide
SGSSSNIGSSSVS

SEQ ID NO: 907 - protein, 13 aa, synthetic construct
  REGION 1..13: note = Description of Artificial Sequence: Syntheticpeptide
SGSSSNIGSSSVS

SEQ ID NO: 908 - protein, 13 aa, synthetic construct
  REGION 1..13: note = Description of Artificial Sequence: Syntheticpeptide
SGSSSNIGSSSVS

SEQ ID NO: 909 - protein, 13 aa, synthetic construct
  REGION 1..13: note = Description of Artificial Sequence: Syntheticpeptide
SGSSSNIGSSSVS

SEQ ID NO: 910 - protein, 13 aa, synthetic construct
  REGION 1..13: note = Description of Artificial Sequence: Syntheticpeptide
SGSSSNIGSSSVS

SEQ ID NO: 911 - protein, 13 aa, synthetic construct
  REGION 1..13: note = Description of Artificial Sequence: Syntheticpeptide
SGSSSNIGSSSVS

SEQ ID NO: 912 - protein, 13 aa, synthetic construct
  REGION 1..13: note = Description of Artificial Sequence: Syntheticpeptide
SGSSSNIGSSSVS

SEQ ID NO: 913 - protein, 13 aa, synthetic construct
  REGION 1..13: note = Description of Artificial Sequence: Syntheticpeptide
SGSSSNIGSSSVS

SEQ ID NO: 914 - protein, 13 aa, synthetic construct
  REGION 1..13: note = Description of Artificial Sequence: Syntheticpeptide
SGSSSNIGSSSVS

SEQ ID NO: 915 - protein, 13 aa, synthetic construct
  REGION 1..13: note = Description of Artificial Sequence: Syntheticpeptide
SGSSSNIGSSSVS

SEQ ID NO: 916 - protein, 13 aa, synthetic construct
  REGION 1..13: note = Description of Artificial Sequence: Syntheticpeptide
SGSSSNIGSSSVS

SEQ ID NO: 917 - protein, 13 aa, synthetic construct
  REGION 1..13: note = Description of Artificial Sequence: Syntheticpeptide
SGSSSNIGSSSVS

SEQ ID NO: 918 - protein, 13 aa, synthetic construct
  REGION 1..13: note = Description of Artificial Sequence: Syntheticpeptide
SGSSSNIGSSSVS

SEQ ID NO: 919 - protein, 13 aa, synthetic construct
  REGION 1..13: note = Description of Artificial Sequence: Syntheticpeptide
SGSSSNIGSSSVS

SEQ ID NO: 920 - protein, 13 aa, synthetic construct
  REGION 1..13: note = Description of Artificial Sequence: Syntheticpeptide
SGSSSNIGSSSVS

SEQ ID NO: 921 - protein, 13 aa, synthetic construct
  REGION 1..13: note = Description of Artificial Sequence: Syntheticpeptide
SGSSSNIGSSSVS

SEQ ID NO: 922 - protein, 13 aa, synthetic construct
  REGION 1..13: note = Description of Artificial Sequence: Syntheticpeptide
SGSSSNIGSSSVS

SEQ ID NO: 923 - protein, 13 aa, synthetic construct
  REGION 1..13: note = Description of Artificial Sequence: Syntheticpeptide
SGSSSNIGSSSVS

SEQ ID NO: 924 - protein, 13 aa, synthetic construct
  REGION 1..13: note = Description of Artificial Sequence: Syntheticpeptide
SGSSSNIGSSSVS

SEQ ID NO: 925 - protein, 13 aa, synthetic construct
  REGION 1..13: note = Description of Artificial Sequence: Syntheticpeptide
SGSSSNIGSSSVS

SEQ ID NO: 926 - protein, 13 aa, synthetic construct
  REGION 1..13: note = Description of Artificial Sequence: Syntheticpeptide
SGSSSNIGSSSVS

SEQ ID NO: 927 - protein, 13 aa, synthetic construct
  REGION 1..13: note = Description of Artificial Sequence: Syntheticpeptide
SGSSSNIGSSSVS

SEQ ID NO: 928 - protein, 13 aa, synthetic construct
  REGION 1..13: note = Description of Artificial Sequence: Syntheticpeptide
SGSSTNIGSSSVY

SEQ ID NO: 929 - protein, 13 aa, synthetic construct
  REGION 1..13: note = Description of Artificial Sequence: Syntheticpeptide
SGSSTNIGSSSVY

SEQ ID NO: 930 - protein, 13 aa, synthetic construct
  REGION 1..13: note = Description of Artificial Sequence: Syntheticpeptide
TGSSSNIGSSYVS

SEQ ID NO: 931 - protein, 13 aa, synthetic construct
  REGION 1..13: note = Description of Artificial Sequence: Syntheticpeptide
TGSSSNIGSSYVS

SEQ ID NO: 932 - protein, 13 aa, synthetic construct
  REGION 1..13: note = Description of Artificial Sequence: Syntheticpeptide
TGSSSNIGSSYVS

SEQ ID NO: 933 - protein, 13 aa, synthetic construct
  REGION 1..13: note = Description of Artificial Sequence: Syntheticpeptide
TGSSSNIGSSYVS

SEQ ID NO: 934 - protein, 13 aa, synthetic construct
  REGION 1..13: note = Description of Artificial Sequence: Syntheticpeptide
SGSPSNIGSASTS

SEQ ID NO: 935 - protein, 13 aa, synthetic construct
  REGION 1..13: note = Description of Artificial Sequence: Syntheticpeptide
SGSPSNIGSASTS

SEQ ID NO: 936 - protein, 13 aa, synthetic construct
  REGION 1..13: note = Description of Artificial Sequence: Syntheticpeptide
SGSPSNIGSASTS

SEQ ID NO: 937 - protein, 13 aa, synthetic construct
  REGION 1..13: note = Description of Artificial Sequence: Syntheticpeptide
SGSPSNIGSASTS

SEQ ID NO: 938 - protein, 13 aa, synthetic construct
  REGION 1..13: note = Description of Artificial Sequence: Syntheticpeptide
SGSPSNIGSASTS

SEQ ID NO: 939 - protein, 13 aa, synthetic construct
  REGION 1..13: note = Description of Artificial Sequence: Syntheticpeptide
SGASSNIGHSSVY

SEQ ID NO: 940 - protein, 13 aa, synthetic construct
  REGION 1..13: note = Description of Artificial Sequence: Syntheticpeptide
SGSSSNIGSSSVS

SEQ ID NO: 941 - protein, 13 aa, synthetic construct
  REGION 1..13: note = Description of Artificial Sequence: Syntheticpeptide
SGSSSNIGSSSVS

SEQ ID NO: 942 - protein, 13 aa, synthetic construct
  REGION 1..13: note = Description of Artificial Sequence: Syntheticpeptide
SGSSSNIGSSSVT

SEQ ID NO: 943 - protein, 13 aa, synthetic construct
  REGION 1..13: note = Description of Artificial Sequence: Syntheticpeptide
SGSKSNIGSSYVS

SEQ ID NO: 944 - protein, 13 aa, synthetic construct
  REGION 1..13: note = Description of Artificial Sequence: Syntheticpeptide
SGSSSNIGSSSVY

SEQ ID NO: 945 - protein, 7 aa, synthetic construct
  REGION 1..7: note = Description of Artificial Sequence: Syntheticpeptide
KNNQRPS

SEQ ID NO: 946 - protein, 7 aa, synthetic construct
  REGION 1..7: note = Description of Artificial Sequence: Syntheticpeptide
KNNQRPS

SEQ ID NO: 947 - protein, 7 aa, synthetic construct
  REGION 1..7: note = Description of Artificial Sequence: Syntheticpeptide
KNNQRPS

SEQ ID NO: 948 - protein, 7 aa, synthetic construct
  REGION 1..7: note = Description of Artificial Sequence: Syntheticpeptide
KNNQRPS

SEQ ID NO: 949 - protein, 7 aa, synthetic construct
  REGION 1..7: note = Description of Artificial Sequence: Syntheticpeptide
KNNQRPS

SEQ ID NO: 950 - protein, 7 aa, synthetic construct
  REGION 1..7: note = Description of Artificial Sequence: Syntheticpeptide
KNNQRPS

SEQ ID NO: 951 - protein, 7 aa, synthetic construct
  REGION 1..7: note = Description of Artificial Sequence: Syntheticpeptide
KNNQRPS

SEQ ID NO: 952 - protein, 7 aa, synthetic construct
  REGION 1..7: note = Description of Artificial Sequence: Syntheticpeptide
KNNQRPS

SEQ ID NO: 953 - protein, 7 aa, synthetic construct
  REGION 1..7: note = Description of Artificial Sequence: Syntheticpeptide
KNNQRPS

SEQ ID NO: 954 - protein, 7 aa, synthetic construct
  REGION 1..7: note = Description of Artificial Sequence: Syntheticpeptide
KNNQRPS

SEQ ID NO: 955 - protein, 7 aa, synthetic construct
  REGION 1..7: note = Description of Artificial Sequence: Syntheticpeptide
KNNQRPS

SEQ ID NO: 956 - protein, 7 aa, synthetic construct
  REGION 1..7: note = Description of Artificial Sequence: Syntheticpeptide
KNNQRPS

SEQ ID NO: 957 - protein, 7 aa, synthetic construct
  REGION 1..7: note = Description of Artificial Sequence: Syntheticpeptide
KNNQRPS

SEQ ID NO: 958 - protein, 7 aa, synthetic construct
  REGION 1..7: note = Description of Artificial Sequence: Syntheticpeptide
KNNQRPS

SEQ ID NO: 959 - protein, 7 aa, synthetic construct
  REGION 1..7: note = Description of Artificial Sequence: Syntheticpeptide
KNNQRPS

SEQ ID NO: 960 - protein, 7 aa, synthetic construct
  REGION 1..7: note = Description of Artificial Sequence: Syntheticpeptide
KNNQRPS

SEQ ID NO: 961 - protein, 7 aa, synthetic construct
  REGION 1..7: note = Description of Artificial Sequence: Syntheticpeptide
KNNQRPS

SEQ ID NO: 962 - protein, 7 aa, synthetic construct
  REGION 1..7: note = Description of Artificial Sequence: Syntheticpeptide
KNNQRPS

SEQ ID NO: 963 - protein, 7 aa, synthetic construct
  REGION 1..7: note = Description of Artificial Sequence: Syntheticpeptide
KNNQRPS

SEQ ID NO: 964 - protein, 7 aa, synthetic construct
  REGION 1..7: note = Description of Artificial Sequence: Syntheticpeptide
KNNQRPS

SEQ ID NO: 965 - protein, 7 aa, synthetic construct
  REGION 1..7: note = Description of Artificial Sequence: Syntheticpeptide
KNNQRPS

SEQ ID NO: 966 - protein, 7 aa, synthetic construct
  REGION 1..7: note = Description of Artificial Sequence: Syntheticpeptide
KNNQRPS

SEQ ID NO: 967 - protein, 7 aa, synthetic construct
  REGION 1..7: note = Description of Artificial Sequence: Syntheticpeptide
KNNQRPS

SEQ ID NO: 968 - protein, 7 aa, synthetic construct
  REGION 1..7: note = Description of Artificial Sequence: Syntheticpeptide
KNNQRPS

SEQ ID NO: 969 - protein, 7 aa, synthetic construct
  REGION 1..7: note = Description of Artificial Sequence: Syntheticpeptide
KNNQRPS

SEQ ID NO: 970 - protein, 7 aa, synthetic construct
  REGION 1..7: note = Description of Artificial Sequence: Syntheticpeptide
KNNQRPS

SEQ ID NO: 971 - protein, 7 aa, synthetic construct
  REGION 1..7: note = Description of Artificial Sequence: Syntheticpeptide
KNNQRPS

SEQ ID NO: 972 - protein, 7 aa, synthetic construct
  REGION 1..7: note = Description of Artificial Sequence: Syntheticpeptide
KNNQRPS

SEQ ID NO: 973 - protein, 7 aa, synthetic construct
  REGION 1..7: note = Description of Artificial Sequence: Syntheticpeptide
KNNQRPS

SEQ ID NO: 974 - protein, 7 aa, synthetic construct
  REGION 1..7: note = Description of Artificial Sequence: Syntheticpeptide
KNNQRPS

SEQ ID NO: 975 - protein, 7 aa, synthetic construct
  REGION 1..7: note = Description of Artificial Sequence: Syntheticpeptide
KNNQRPS

SEQ ID NO: 976 - protein, 7 aa, synthetic construct
  REGION 1..7: note = Description of Artificial Sequence: Syntheticpeptide
KNNQRPS

SEQ ID NO: 977 - protein, 7 aa, synthetic construct
  REGION 1..7: note = Description of Artificial Sequence: Syntheticpeptide
KNNQRPS

SEQ ID NO: 978 - protein, 7 aa, synthetic construct
  REGION 1..7: note = Description of Artificial Sequence: Syntheticpeptide
KNNQRPS

SEQ ID NO: 979 - protein, 7 aa, synthetic construct
  REGION 1..7: note = Description of Artificial Sequence: Syntheticpeptide
KNNQRPS

SEQ ID NO: 980 - protein, 7 aa, synthetic construct
  REGION 1..7: note = Description of Artificial Sequence: Syntheticpeptide
KNNQRPS

SEQ ID NO: 981 - protein, 7 aa, synthetic construct
  REGION 1..7: note = Description of Artificial Sequence: Syntheticpeptide
KNNQRPS

SEQ ID NO: 982 - protein, 7 aa, synthetic construct
  REGION 1..7: note = Description of Artificial Sequence: Syntheticpeptide
KNNQRPS

SEQ ID NO: 983 - protein, 7 aa, synthetic construct
  REGION 1..7: note = Description of Artificial Sequence: Syntheticpeptide
KNNQRPS

SEQ ID NO: 984 - protein, 7 aa, synthetic construct
  REGION 1..7: note = Description of Artificial Sequence: Syntheticpeptide
KNNQRPS

SEQ ID NO: 985 - protein, 7 aa, synthetic construct
  REGION 1..7: note = Description of Artificial Sequence: Syntheticpeptide
KNNQRPS

SEQ ID NO: 986 - protein, 7 aa, synthetic construct
  REGION 1..7: note = Description of Artificial Sequence: Syntheticpeptide
KNNQRPS

SEQ ID NO: 987 - protein, 7 aa, synthetic construct
  REGION 1..7: note = Description of Artificial Sequence: Syntheticpeptide
KNNQRPS

SEQ ID NO: 988 - protein, 7 aa, synthetic construct
  REGION 1..7: note = Description of Artificial Sequence: Syntheticpeptide
KNNQRPS

SEQ ID NO: 989 - protein, 7 aa, synthetic construct
  REGION 1..7: note = Description of Artificial Sequence: Syntheticpeptide
KNNQRPS

SEQ ID NO: 990 - protein, 7 aa, synthetic construct
  REGION 1..7: note = Description of Artificial Sequence: Syntheticpeptide
KNNQRPS

SEQ ID NO: 991 - protein, 7 aa, synthetic construct
  REGION 1..7: note = Description of Artificial Sequence: Syntheticpeptide
KNNQRPS

SEQ ID NO: 992 - protein, 7 aa, synthetic construct
  REGION 1..7: note = Description of Artificial Sequence: Syntheticpeptide
KNNQRPS

SEQ ID NO: 993 - protein, 7 aa, synthetic construct
  REGION 1..7: note = Description of Artificial Sequence: Syntheticpeptide
KNNQRPS

SEQ ID NO: 994 - protein, 7 aa, synthetic construct
  REGION 1..7: note = Description of Artificial Sequence: Syntheticpeptide
KNNQRPS

SEQ ID NO: 995 - protein, 7 aa, synthetic construct
  REGION 1..7: note = Description of Artificial Sequence: Syntheticpeptide
KNNQRPS

SEQ ID NO: 996 - protein, 7 aa, synthetic construct
  REGION 1..7: note = Description of Artificial Sequence: Syntheticpeptide
KNNQRPS

SEQ ID NO: 997 - protein, 7 aa, synthetic construct
  REGION 1..7: note = Description of Artificial Sequence: Syntheticpeptide
KNNQRPS

SEQ ID NO: 998 - protein, 7 aa, synthetic construct
  REGION 1..7: note = Description of Artificial Sequence: Syntheticpeptide
KNNQRPS

SEQ ID NO: 999 - protein, 7 aa, synthetic construct
  REGION 1..7: note = Description of Artificial Sequence: Syntheticpeptide
KNNQRPS

SEQ ID NO: 1000 - protein, 7 aa, synthetic construct
  REGION 1..7: note = Description of Artificial Sequence: Syntheticpeptide
KNNQRPS

SEQ ID NO: 1001 - protein, 7 aa, synthetic construct
  REGION 1..7: note = Description of Artificial Sequence: Syntheticpeptide
KNNQRPS

SEQ ID NO: 1002 - protein, 7 aa, synthetic construct
  REGION 1..7: note = Description of Artificial Sequence: Syntheticpeptide
KNNQRPS

SEQ ID NO: 1003 - protein, 7 aa, synthetic construct
  REGION 1..7: note = Description of Artificial Sequence: Syntheticpeptide
KNNQRPS

SEQ ID NO: 1004 - protein, 7 aa, synthetic construct
  REGION 1..7: note = Description of Artificial Sequence: Syntheticpeptide
KNNQRPS

SEQ ID NO: 1005 - protein, 7 aa, synthetic construct
  REGION 1..7: note = Description of Artificial Sequence: Syntheticpeptide
KNNQRPS

SEQ ID NO: 1006 - protein, 7 aa, synthetic construct
  REGION 1..7: note = Description of Artificial Sequence: Syntheticpeptide
KNNQRPS

SEQ ID NO: 1007 - protein, 7 aa, synthetic construct
  REGION 1..7: note = Description of Artificial Sequence: Syntheticpeptide
KNNQRPS

SEQ ID NO: 1008 - protein, 7 aa, synthetic construct
  REGION 1..7: note = Description of Artificial Sequence: Syntheticpeptide
KNNQRPS

SEQ ID NO: 1009 - protein, 7 aa, synthetic construct
  REGION 1..7: note = Description of Artificial Sequence: Syntheticpeptide
KNNQRPS

SEQ ID NO: 1010 - protein, 7 aa, synthetic construct
  REGION 1..7: note = Description of Artificial Sequence: Syntheticpeptide
KNNQRPS

SEQ ID NO: 1011 - protein, 7 aa, synthetic construct
  REGION 1..7: note = Description of Artificial Sequence: Syntheticpeptide
KNNQRPS

SEQ ID NO: 1012 - protein, 7 aa, synthetic construct
  REGION 1..7: note = Description of Artificial Sequence: Syntheticpeptide
KNNQRPS

SEQ ID NO: 1013 - protein, 7 aa, synthetic construct
  REGION 1..7: note = Description of Artificial Sequence: Syntheticpeptide
KNNQRPS

SEQ ID NO: 1014 - protein, 7 aa, synthetic construct
  REGION 1..7: note = Description of Artificial Sequence: Syntheticpeptide
KNNQRPS

SEQ ID NO: 1015 - protein, 7 aa, synthetic construct
  REGION 1..7: note = Description of Artificial Sequence: Syntheticpeptide
KNNQRPS

SEQ ID NO: 1016 - protein, 7 aa, synthetic construct
  REGION 1..7: note = Description of Artificial Sequence: Syntheticpeptide
KNNQRPS

SEQ ID NO: 1017 - protein, 7 aa, synthetic construct
  REGION 1..7: note = Description of Artificial Sequence: Syntheticpeptide
KNNQRPS

SEQ ID NO: 1018 - protein, 7 aa, synthetic construct
  REGION 1..7: note = Description of Artificial Sequence: Syntheticpeptide
KNNQRPS

SEQ ID NO: 1019 - protein, 7 aa, synthetic construct
  REGION 1..7: note = Description of Artificial Sequence: Syntheticpeptide
KNNQRPS

SEQ ID NO: 1020 - protein, 7 aa, synthetic construct
  REGION 1..7: note = Description of Artificial Sequence: Syntheticpeptide
KNNQRPS

SEQ ID NO: 1021 - protein, 7 aa, synthetic construct
  REGION 1..7: note = Description of Artificial Sequence: Syntheticpeptide
KNNQRPS

SEQ ID NO: 1022 - protein, 7 aa, synthetic construct
  REGION 1..7: note = Description of Artificial Sequence: Syntheticpeptide
KNNQRPS

SEQ ID NO: 1023 - protein, 7 aa, synthetic construct
  REGION 1..7: note = Description of Artificial Sequence: Syntheticpeptide
KNNQRPS

SEQ ID NO: 1024 - protein, 7 aa, synthetic construct
  REGION 1..7: note = Description of Artificial Sequence: Syntheticpeptide
KNNQRPS

SEQ ID NO: 1025 - protein, 7 aa, synthetic construct
  REGION 1..7: note = Description of Artificial Sequence: Syntheticpeptide
KNNQRPS

SEQ ID NO: 1026 - protein, 7 aa, synthetic construct
  REGION 1..7: note = Description of Artificial Sequence: Syntheticpeptide
KNNQRPS

SEQ ID NO: 1027 - protein, 7 aa, synthetic construct
  REGION 1..7: note = Description of Artificial Sequence: Syntheticpeptide
KNNQRPS

SEQ ID NO: 1028 - protein, 7 aa, synthetic construct
  REGION 1..7: note = Description of Artificial Sequence: Syntheticpeptide
KNNQRPS

SEQ ID NO: 1029 - protein, 7 aa, synthetic construct
  REGION 1..7: note = Description of Artificial Sequence: Syntheticpeptide
KNNQRPS

SEQ ID NO: 1030 - protein, 7 aa, synthetic construct
  REGION 1..7: note = Description of Artificial Sequence: Syntheticpeptide
KNNQRPS

SEQ ID NO: 1031 - protein, 7 aa, synthetic construct
  REGION 1..7: note = Description of Artificial Sequence: Syntheticpeptide
KNNQRPS

SEQ ID NO: 1032 - protein, 7 aa, synthetic construct
  REGION 1..7: note = Description of Artificial Sequence: Syntheticpeptide
KNNYRPS

SEQ ID NO: 1033 - protein, 7 aa, synthetic construct
  REGION 1..7: note = Description of Artificial Sequence: Syntheticpeptide
KNNQRPS

SEQ ID NO: 1034 - protein, 7 aa, synthetic construct
  REGION 1..7: note = Description of Artificial Sequence: Syntheticpeptide
KNNQRPS

SEQ ID NO: 1035 - protein, 7 aa, synthetic construct
  REGION 1..7: note = Description of Artificial Sequence: Syntheticpeptide
KNNQRPS

SEQ ID NO: 1036 - protein, 7 aa, synthetic construct
  REGION 1..7: note = Description of Artificial Sequence: Syntheticpeptide
KNNQRPS

SEQ ID NO: 1037 - protein, 7 aa, synthetic construct
  REGION 1..7: note = Description of Artificial Sequence: Syntheticpeptide
KNNQRPS

SEQ ID NO: 1038 - protein, 7 aa, synthetic construct
  REGION 1..7: note = Description of Artificial Sequence: Syntheticpeptide
KNNQRPS

SEQ ID NO: 1039 - protein, 7 aa, synthetic construct
  REGION 1..7: note = Description of Artificial Sequence: Syntheticpeptide
KNNQRPS

SEQ ID NO: 1040 - protein, 7 aa, synthetic construct
  REGION 1..7: note = Description of Artificial Sequence: Syntheticpeptide
KNNQRPS

SEQ ID NO: 1041 - protein, 7 aa, synthetic construct
  REGION 1..7: note = Description of Artificial Sequence: Syntheticpeptide
KNNQRPS

SEQ ID NO: 1042 - protein, 7 aa, synthetic construct
  REGION 1..7: note = Description of Artificial Sequence: Syntheticpeptide
KNNQRPS

SEQ ID NO: 1043 - protein, 7 aa, synthetic construct
  REGION 1..7: note = Description of Artificial Sequence: Syntheticpeptide
KNNQRPS

SEQ ID NO: 1044 - protein, 7 aa, synthetic construct
  REGION 1..7: note = Description of Artificial Sequence: Syntheticpeptide
KNNQRPS

SEQ ID NO: 1045 - protein, 7 aa, synthetic construct
  REGION 1..7: note = Description of Artificial Sequence: Syntheticpeptide
KNNQRPS

SEQ ID NO: 1046 - protein, 7 aa, synthetic construct
  REGION 1..7: note = Description of Artificial Sequence: Syntheticpeptide
KNNQRPS

SEQ ID NO: 1047 - protein, 7 aa, synthetic construct
  REGION 1..7: note = Description of Artificial Sequence: Syntheticpeptide
KNNQRPS

SEQ ID NO: 1048 - protein, 7 aa, synthetic construct
  REGION 1..7: note = Description of Artificial Sequence: Syntheticpeptide
KNNQRPS

SEQ ID NO: 1049 - protein, 7 aa, synthetic construct
  REGION 1..7: note = Description of Artificial Sequence: Syntheticpeptide
KNNQRPS

SEQ ID NO: 1050 - protein, 7 aa, synthetic construct
  REGION 1..7: note = Description of Artificial Sequence: Syntheticpeptide
KNNQRPS

SEQ ID NO: 1051 - protein, 7 aa, synthetic construct
  REGION 1..7: note = Description of Artificial Sequence: Syntheticpeptide
RNNQRPS

SEQ ID NO: 1052 - protein, 7 aa, synthetic construct
  REGION 1..7: note = Description of Artificial Sequence: Syntheticpeptide
NNNQRPS

SEQ ID NO: 1053 - protein, 7 aa, synthetic construct
  REGION 1..7: note = Description of Artificial Sequence: Syntheticpeptide
MNNQRPS

SEQ ID NO: 1054 - protein, 7 aa, synthetic construct
  REGION 1..7: note = Description of Artificial Sequence: Syntheticpeptide
ANNQRPS

SEQ ID NO: 1055 - protein, 7 aa, synthetic construct
  REGION 1..7: note = Description of Artificial Sequence: Syntheticpeptide
HNNQRPS

SEQ ID NO: 1056 - protein, 7 aa, synthetic construct
  REGION 1..7: note = Description of Artificial Sequence: Syntheticpeptide
KDNQRPS

SEQ ID NO: 1057 - protein, 7 aa, synthetic construct
  REGION 1..7: note = Description of Artificial Sequence: Syntheticpeptide
KNTQRPS

SEQ ID NO: 1058 - protein, 7 aa, synthetic construct
  REGION 1..7: note = Description of Artificial Sequence: Syntheticpeptide
KNNYRPS

SEQ ID NO: 1059 - protein, 7 aa, synthetic construct
  REGION 1..7: note = Description of Artificial Sequence: Syntheticpeptide
KNNARPS

SEQ ID NO: 1060 - protein, 7 aa, synthetic construct
  REGION 1..7: note = Description of Artificial Sequence: Syntheticpeptide
KNNLRPS

SEQ ID NO: 1061 - protein, 7 aa, synthetic construct
  REGION 1..7: note = Description of Artificial Sequence: Syntheticpeptide
KNNQQPS

SEQ ID NO: 1062 - protein, 7 aa, synthetic construct
  REGION 1..7: note = Description of Artificial Sequence: Syntheticpeptide
KNNQRAS

SEQ ID NO: 1063 - protein, 7 aa, synthetic construct
  REGION 1..7: note = Description of Artificial Sequence: Syntheticpeptide
KNNQRPY

SEQ ID NO: 1064 - protein, 7 aa, synthetic construct
  REGION 1..7: note = Description of Artificial Sequence: Syntheticpeptide
KNNQRPL

SEQ ID NO: 1065 - protein, 7 aa, synthetic construct
  REGION 1..7: note = Description of Artificial Sequence: Syntheticpeptide
KNNQRPS

SEQ ID NO: 1066 - protein, 7 aa, synthetic construct
  REGION 1..7: note = Description of Artificial Sequence: Syntheticpeptide
KNNQRPS

SEQ ID NO: 1067 - protein, 7 aa, synthetic construct
  REGION 1..7: note = Description of Artificial Sequence: Syntheticpeptide
KNNQRPS

SEQ ID NO: 1068 - protein, 7 aa, synthetic construct
  REGION 1..7: note = Description of Artificial Sequence: Syntheticpeptide
KNNQRPS

SEQ ID NO: 1069 - protein, 7 aa, synthetic construct
  REGION 1..7: note = Description of Artificial Sequence: Syntheticpeptide
KNNQRPS

SEQ ID NO: 1070 - protein, 7 aa, synthetic construct
  REGION 1..7: note = Description of Artificial Sequence: Syntheticpeptide
KNNQRPS

SEQ ID NO: 1071 - protein, 7 aa, synthetic construct
  REGION 1..7: note = Description of Artificial Sequence: Syntheticpeptide
KNNQRPS

SEQ ID NO: 1072 - protein, 7 aa, synthetic construct
  REGION 1..7: note = Description of Artificial Sequence: Syntheticpeptide
KNNQRPS

SEQ ID NO: 1073 - protein, 7 aa, synthetic construct
  REGION 1..7: note = Description of Artificial Sequence: Syntheticpeptide
KNNQRPS

SEQ ID NO: 1074 - protein, 7 aa, synthetic construct
  REGION 1..7: note = Description of Artificial Sequence: Syntheticpeptide
KNNQRPS

SEQ ID NO: 1075 - protein, 7 aa, synthetic construct
  REGION 1..7: note = Description of Artificial Sequence: Syntheticpeptide
KNNQRPS

SEQ ID NO: 1076 - protein, 7 aa, synthetic construct
  REGION 1..7: note = Description of Artificial Sequence: Syntheticpeptide
KNNQRPS

SEQ ID NO: 1077 - protein, 7 aa, synthetic construct
  REGION 1..7: note = Description of Artificial Sequence: Syntheticpeptide
KNNQRPS

SEQ ID NO: 1078 - protein, 7 aa, synthetic construct
  REGION 1..7: note = Description of Artificial Sequence: Syntheticpeptide
KNNQRPS

SEQ ID NO: 1079 - protein, 7 aa, synthetic construct
  REGION 1..7: note = Description of Artificial Sequence: Syntheticpeptide
KNNQRPS

SEQ ID NO: 1080 - protein, 7 aa, synthetic construct
  REGION 1..7: note = Description of Artificial Sequence: Syntheticpeptide
KNNQRPS

SEQ ID NO: 1081 - protein, 7 aa, synthetic construct
  REGION 1..7: note = Description of Artificial Sequence: Syntheticpeptide
KNNQRPS

SEQ ID NO: 1082 - protein, 7 aa, synthetic construct
  REGION 1..7: note = Description of Artificial Sequence: Syntheticpeptide
KNNQRPS

SEQ ID NO: 1083 - protein, 7 aa, synthetic construct
  REGION 1..7: note = Description of Artificial Sequence: Syntheticpeptide
KNNQRPS

SEQ ID NO: 1084 - protein, 7 aa, synthetic construct
  REGION 1..7: note = Description of Artificial Sequence: Syntheticpeptide
KNNQRPS

SEQ ID NO: 1085 - protein, 7 aa, synthetic construct
  REGION 1..7: note = Description of Artificial Sequence: Syntheticpeptide
KNNQRPS

SEQ ID NO: 1086 - protein, 7 aa, synthetic construct
  REGION 1..7: note = Description of Artificial Sequence: Syntheticpeptide
KNNQRPS

SEQ ID NO: 1087 - protein, 7 aa, synthetic construct
  REGION 1..7: note = Description of Artificial Sequence: Syntheticpeptide
KNNQRPS

SEQ ID NO: 1088 - protein, 7 aa, synthetic construct
  REGION 1..7: note = Description of Artificial Sequence: Syntheticpeptide
KNNQRPS

SEQ ID NO: 1089 - protein, 7 aa, synthetic construct
  REGION 1..7: note = Description of Artificial Sequence: Syntheticpeptide
KNNQRPS

SEQ ID NO: 1090 - protein, 7 aa, synthetic construct
  REGION 1..7: note = Description of Artificial Sequence: Syntheticpeptide
KNNQRPS

SEQ ID NO: 1091 - protein, 7 aa, synthetic construct
  REGION 1..7: note = Description of Artificial Sequence: Syntheticpeptide
KNNQRPS

SEQ ID NO: 1092 - protein, 7 aa, synthetic construct
  REGION 1..7: note = Description of Artificial Sequence: Syntheticpeptide
KNNQRPS

SEQ ID NO: 1093 - protein, 7 aa, synthetic construct
  REGION 1..7: note = Description of Artificial Sequence: Syntheticpeptide
KNNQRPS

SEQ ID NO: 1094 - protein, 7 aa, synthetic construct
  REGION 1..7: note = Description of Artificial Sequence: Syntheticpeptide
KNNQRPS

SEQ ID NO: 1095 - protein, 7 aa, synthetic construct
  REGION 1..7: note = Description of Artificial Sequence: Syntheticpeptide
KNNQRPS

SEQ ID NO: 1096 - protein, 7 aa, synthetic construct
  REGION 1..7: note = Description of Artificial Sequence: Syntheticpeptide
KNNQRPS

SEQ ID NO: 1097 - protein, 7 aa, synthetic construct
  REGION 1..7: note = Description of Artificial Sequence: Syntheticpeptide
KNNQRPS

SEQ ID NO: 1098 - protein, 7 aa, synthetic construct
  REGION 1..7: note = Description of Artificial Sequence: Syntheticpeptide
KNNQRPS

SEQ ID NO: 1099 - protein, 7 aa, synthetic construct
  REGION 1..7: note = Description of Artificial Sequence: Syntheticpeptide
KNNQRPS

SEQ ID NO: 1100 - protein, 7 aa, synthetic construct
  REGION 1..7: note = Description of Artificial Sequence: Syntheticpeptide
KNNQRPS

SEQ ID NO: 1101 - protein, 7 aa, synthetic construct
  REGION 1..7: note = Description of Artificial Sequence: Syntheticpeptide
KNNQRPS

SEQ ID NO: 1102 - protein, 7 aa, synthetic construct
  REGION 1..7: note = Description of Artificial Sequence: Syntheticpeptide
KNNQRPS

SEQ ID NO: 1103 - protein, 7 aa, synthetic construct
  REGION 1..7: note = Description of Artificial Sequence: Syntheticpeptide
KNNQRPS

SEQ ID NO: 1104 - protein, 7 aa, synthetic construct
  REGION 1..7: note = Description of Artificial Sequence: Syntheticpeptide
KNNQRPS

SEQ ID NO: 1105 - protein, 7 aa, synthetic construct
  REGION 1..7: note = Description of Artificial Sequence: Syntheticpeptide
KNNQRPS

SEQ ID NO: 1106 - protein, 7 aa, synthetic construct
  REGION 1..7: note = Description of Artificial Sequence: Syntheticpeptide
KNNQRPS

SEQ ID NO: 1107 - protein, 7 aa, synthetic construct
  REGION 1..7: note = Description of Artificial Sequence: Syntheticpeptide
KNNQRPS

SEQ ID NO: 1108 - protein, 7 aa, synthetic construct
  REGION 1..7: note = Description of Artificial Sequence: Syntheticpeptide
KNNQRPS

SEQ ID NO: 1109 - protein, 7 aa, synthetic construct
  REGION 1..7: note = Description of Artificial Sequence: Syntheticpeptide
KNNQRPS

SEQ ID NO: 1110 - protein, 7 aa, synthetic construct
  REGION 1..7: note = Description of Artificial Sequence: Syntheticpeptide
KNNQRPS

SEQ ID NO: 1111 - protein, 7 aa, synthetic construct
  REGION 1..7: note = Description of Artificial Sequence: Syntheticpeptide
KNNQRPS

SEQ ID NO: 1112 - protein, 7 aa, synthetic construct
  REGION 1..7: note = Description of Artificial Sequence: Syntheticpeptide
KNNQRPS

SEQ ID NO: 1113 - protein, 7 aa, synthetic construct
  REGION 1..7: note = Description of Artificial Sequence: Syntheticpeptide
KNNQRPS

SEQ ID NO: 1114 - protein, 7 aa, synthetic construct
  REGION 1..7: note = Description of Artificial Sequence: Syntheticpeptide
KNNQRPS

SEQ ID NO: 1115 - protein, 7 aa, synthetic construct
  REGION 1..7: note = Description of Artificial Sequence: Syntheticpeptide
KNNQRPS

SEQ ID NO: 1116 - protein, 7 aa, synthetic construct
  REGION 1..7: note = Description of Artificial Sequence: Syntheticpeptide
KNNQRPS

SEQ ID NO: 1117 - protein, 7 aa, synthetic construct
  REGION 1..7: note = Description of Artificial Sequence: Syntheticpeptide
KNNQRPS

SEQ ID NO: 1118 - protein, 7 aa, synthetic construct
  REGION 1..7: note = Description of Artificial Sequence: Syntheticpeptide
KNNQRPS

SEQ ID NO: 1119 - protein, 7 aa, synthetic construct
  REGION 1..7: note = Description of Artificial Sequence: Syntheticpeptide
KNNQRPS

SEQ ID NO: 1120 - protein, 7 aa, synthetic construct
  REGION 1..7: note = Description of Artificial Sequence: Syntheticpeptide
KNNQRPS

SEQ ID NO: 1121 - protein, 7 aa, synthetic construct
  REGION 1..7: note = Description of Artificial Sequence: Syntheticpeptide
KNNQRPS

SEQ ID NO: 1122 - protein, 7 aa, synthetic construct
  REGION 1..7: note = Description of Artificial Sequence: Syntheticpeptide
KNNYRPS

SEQ ID NO: 1123 - protein, 7 aa, synthetic construct
  REGION 1..7: note = Description of Artificial Sequence: Syntheticpeptide
KNNYRAS

SEQ ID NO: 1124 - protein, 7 aa, synthetic construct
  REGION 1..7: note = Description of Artificial Sequence: Syntheticpeptide
KNSLRPQ

SEQ ID NO: 1125 - protein, 7 aa, synthetic construct
  REGION 1..7: note = Description of Artificial Sequence: Syntheticpeptide
KNSLRPQ

SEQ ID NO: 1126 - protein, 7 aa, synthetic construct
  REGION 1..7: note = Description of Artificial Sequence: Syntheticpeptide
KNSLRPQ

SEQ ID NO: 1127 - protein, 7 aa, synthetic construct
  REGION 1..7: note = Description of Artificial Sequence: Syntheticpeptide
KNSLRPQ

SEQ ID NO: 1128 - protein, 7 aa, synthetic construct
  REGION 1..7: note = Description of Artificial Sequence: Syntheticpeptide
KNNQRPS

SEQ ID NO: 1129 - protein, 7 aa, synthetic construct
  REGION 1..7: note = Description of Artificial Sequence: Syntheticpeptide
KNNQRPS

SEQ ID NO: 1130 - protein, 7 aa, synthetic construct
  REGION 1..7: note = Description of Artificial Sequence: Syntheticpeptide
KNNQRPS

SEQ ID NO: 1131 - protein, 7 aa, synthetic construct
  REGION 1..7: note = Description of Artificial Sequence: Syntheticpeptide
KNNQRPS

SEQ ID NO: 1132 - protein, 7 aa, synthetic construct
  REGION 1..7: note = Description of Artificial Sequence: Syntheticpeptide
KNNQRPS

SEQ ID NO: 1133 - protein, 7 aa, synthetic construct
  REGION 1..7: note = Description of Artificial Sequence: Syntheticpeptide
RNNQQPL

SEQ ID NO: 1134 - protein, 7 aa, synthetic construct
  REGION 1..7: note = Description of Artificial Sequence: Syntheticpeptide
KNTQRAS

SEQ ID NO: 1135 - protein, 7 aa, synthetic construct
  REGION 1..7: note = Description of Artificial Sequence: Syntheticpeptide
RNNQQPL

SEQ ID NO: 1136 - protein, 7 aa, synthetic construct
  REGION 1..7: note = Description of Artificial Sequence: Syntheticpeptide
KNNARPS

SEQ ID NO: 1137 - protein, 7 aa, synthetic construct
  REGION 1..7: note = Description of Artificial Sequence: Syntheticpeptide
KDNQRAS

SEQ ID NO: 1138 - protein, 7 aa, synthetic construct
  REGION 1..7: note = Description of Artificial Sequence: Syntheticpeptide
KNNQRPS

SEQ ID NO: 1139 - protein, 11 aa, synthetic construct
  REGION 1..11: note = Description of Artificial Sequence: Syntheticpeptide
STWDESLSVRV

SEQ ID NO: 1140 - protein, 11 aa, synthetic construct
  REGION 1..11: note = Description of Artificial Sequence: Syntheticpeptide
STWDESLSVRV

SEQ ID NO: 1141 - protein, 11 aa, synthetic construct
  REGION 1..11: note = Description of Artificial Sequence: Syntheticpeptide
STWDESLSVRV

SEQ ID NO: 1142 - protein, 11 aa, synthetic construct
  REGION 1..11: note = Description of Artificial Sequence: Syntheticpeptide
STWDESLSVRV

SEQ ID NO: 1143 - protein, 11 aa, synthetic construct
  REGION 1..11: note = Description of Artificial Sequence: Syntheticpeptide
STWDDSLSVRV

SEQ ID NO: 1144 - protein, 11 aa, synthetic construct
  REGION 1..11: note = Description of Artificial Sequence: Syntheticpeptide
STWDDSLSVRV

SEQ ID NO: 1145 - protein, 11 aa, synthetic construct
  REGION 1..11: note = Description of Artificial Sequence: Syntheticpeptide
STWDDSLSVRV

SEQ ID NO: 1146 - protein, 11 aa, synthetic construct
  REGION 1..11: note = Description of Artificial Sequence: Syntheticpeptide
STWDDSLSVRV

SEQ ID NO: 1147 - protein, 11 aa, synthetic construct
  REGION 1..11: note = Description of Artificial Sequence: Syntheticpeptide
STWDDSLSVRV

SEQ ID NO: 1148 - protein, 11 aa, synthetic construct
  REGION 1..11: note = Description of Artificial Sequence: Syntheticpeptide
STWDDSLSVRV

SEQ ID NO: 1149 - protein, 11 aa, synthetic construct
  REGION 1..11: note = Description of Artificial Sequence: Syntheticpeptide
STWDDSLSVRV

SEQ ID NO: 1150 - protein, 11 aa, synthetic construct
  REGION 1..11: note = Description of Artificial Sequence: Syntheticpeptide
STWDDSLSVRV

SEQ ID NO: 1151 - protein, 11 aa, synthetic construct
  REGION 1..11: note = Description of Artificial Sequence: Syntheticpeptide
STWDDSLSVRV

SEQ ID NO: 1152 - protein, 11 aa, synthetic construct
  REGION 1..11: note = Description of Artificial Sequence: Syntheticpeptide
STWDDSLSVRV

SEQ ID NO: 1153 - protein, 11 aa, synthetic construct
  REGION 1..11: note = Description of Artificial Sequence: Syntheticpeptide
STWDDSLSVRV

SEQ ID NO: 1154 - protein, 11 aa, synthetic construct
  REGION 1..11: note = Description of Artificial Sequence: Syntheticpeptide
STWDDSLSVRV

SEQ ID NO: 1155 - protein, 11 aa, synthetic construct
  REGION 1..11: note = Description of Artificial Sequence: Syntheticpeptide
STWDDSLSVRV

SEQ ID NO: 1156 - protein, 11 aa, synthetic construct
  REGION 1..11: note = Description of Artificial Sequence: Syntheticpeptide
STWDDSLSVRV

SEQ ID NO: 1157 - protein, 11 aa, synthetic construct
  REGION 1..11: note = Description of Artificial Sequence: Syntheticpeptide
STWDDSLSVRV

SEQ ID NO: 1158 - protein, 11 aa, synthetic construct
  REGION 1..11: note = Description of Artificial Sequence: Syntheticpeptide
STWDDSLSVRV

SEQ ID NO: 1159 - protein, 11 aa, synthetic construct
  REGION 1..11: note = Description of Artificial Sequence: Syntheticpeptide
STWDDSLSVRV

SEQ ID NO: 1160 - protein, 11 aa, synthetic construct
  REGION 1..11: note = Description of Artificial Sequence: Syntheticpeptide
STWDDSLSVRV

SEQ ID NO: 1161 - protein, 11 aa, synthetic construct
  REGION 1..11: note = Description of Artificial Sequence: Syntheticpeptide
STWDDSLSVRV

SEQ ID NO: 1162 - protein, 11 aa, synthetic construct
  REGION 1..11: note = Description of Artificial Sequence: Syntheticpeptide
STWDDSLSVRV

SEQ ID NO: 1163 - protein, 11 aa, synthetic construct
  REGION 1..11: note = Description of Artificial Sequence: Syntheticpeptide
STWDDSLSVRV

SEQ ID NO: 1164 - protein, 11 aa, synthetic construct
  REGION 1..11: note = Description of Artificial Sequence: Syntheticpeptide
STWDDSLSVRV

SEQ ID NO: 1165 - protein, 11 aa, synthetic construct
  REGION 1..11: note = Description of Artificial Sequence: Syntheticpeptide
STWDDSLSVRV

SEQ ID NO: 1166 - protein, 11 aa, synthetic construct
  REGION 1..11: note = Description of Artificial Sequence: Syntheticpeptide
STWDDSLSVRV

SEQ ID NO: 1167 - protein, 11 aa, synthetic construct
  REGION 1..11: note = Description of Artificial Sequence: Syntheticpeptide
STWDDSLSVRV

SEQ ID NO: 1168 - protein, 11 aa, synthetic construct
  REGION 1..11: note = Description of Artificial Sequence: Syntheticpeptide
STWDDSLSVRV

SEQ ID NO: 1169 - protein, 11 aa, synthetic construct
  REGION 1..11: note = Description of Artificial Sequence: Syntheticpeptide
STWDDSLSVRV

SEQ ID NO: 1170 - protein, 11 aa, synthetic construct
  REGION 1..11: note = Description of Artificial Sequence: Syntheticpeptide
STWDDSLSVRV

SEQ ID NO: 1171 - protein, 11 aa, synthetic construct
  REGION 1..11: note = Description of Artificial Sequence: Syntheticpeptide
STWDDSLSVRV

SEQ ID NO: 1172 - protein, 11 aa, synthetic construct
  REGION 1..11: note = Description of Artificial Sequence: Syntheticpeptide
STWDDSLSVRV

SEQ ID NO: 1173 - protein, 11 aa, synthetic construct
  REGION 1..11: note = Description of Artificial Sequence: Syntheticpeptide
STWDDSLSVRV

SEQ ID NO: 1174 - protein, 11 aa, synthetic construct
  REGION 1..11: note = Description of Artificial Sequence: Syntheticpeptide
STWDDSLSVRV

SEQ ID NO: 1175 - protein, 11 aa, synthetic construct
  REGION 1..11: note = Description of Artificial Sequence: Syntheticpeptide
STWDDSLSVRV

SEQ ID NO: 1176 - protein, 11 aa, synthetic construct
  REGION 1..11: note = Description of Artificial Sequence: Syntheticpeptide
STWDDSLSVRV

SEQ ID NO: 1177 - protein, 11 aa, synthetic construct
  REGION 1..11: note = Description of Artificial Sequence: Syntheticpeptide
STWDDSLSVRV

SEQ ID NO: 1178 - protein, 11 aa, synthetic construct
  REGION 1..11: note = Description of Artificial Sequence: Syntheticpeptide
STWDDSLSVRV

SEQ ID NO: 1179 - protein, 11 aa, synthetic construct
  REGION 1..11: note = Description of Artificial Sequence: Syntheticpeptide
STWDDSLSVRV

SEQ ID NO: 1180 - protein, 11 aa, synthetic construct
  REGION 1..11: note = Description of Artificial Sequence: Syntheticpeptide
STWDDSLSVRV

SEQ ID NO: 1181 - protein, 11 aa, synthetic construct
  REGION 1..11: note = Description of Artificial Sequence: Syntheticpeptide
STWDDSLSVRV

SEQ ID NO: 1182 - protein, 11 aa, synthetic construct
  REGION 1..11: note = Description of Artificial Sequence: Syntheticpeptide
STWDDSLSVRV

SEQ ID NO: 1183 - protein, 11 aa, synthetic construct
  REGION 1..11: note = Description of Artificial Sequence: Syntheticpeptide
STWDDSLSVRV

SEQ ID NO: 1184 - protein, 11 aa, synthetic construct
  REGION 1..11: note = Description of Artificial Sequence: Syntheticpeptide
STWDDSLSVRV

SEQ ID NO: 1185 - protein, 11 aa, synthetic construct
  REGION 1..11: note = Description of Artificial Sequence: Syntheticpeptide
STWDDSLSVRV

SEQ ID NO: 1186 - protein, 11 aa, synthetic construct
  REGION 1..11: note = Description of Artificial Sequence: Syntheticpeptide
STWDDSLSVRV

SEQ ID NO: 1187 - protein, 11 aa, synthetic construct
  REGION 1..11: note = Description of Artificial Sequence: Syntheticpeptide
STWDDSLSVRV

SEQ ID NO: 1188 - protein, 11 aa, synthetic construct
  REGION 1..11: note = Description of Artificial Sequence: Syntheticpeptide
STWDDSLSVRV

SEQ ID NO: 1189 - protein, 11 aa, synthetic construct
  REGION 1..11: note = Description of Artificial Sequence: Syntheticpeptide
STWDDSLSVRV

SEQ ID NO: 1190 - protein, 11 aa, synthetic construct
  REGION 1..11: note = Description of Artificial Sequence: Syntheticpeptide
STWDDSLSVRV

SEQ ID NO: 1191 - protein, 11 aa, synthetic construct
  REGION 1..11: note = Description of Artificial Sequence: Syntheticpeptide
STWDDSLSVRV

SEQ ID NO: 1192 - protein, 11 aa, synthetic construct
  REGION 1..11: note = Description of Artificial Sequence: Syntheticpeptide
STWDDSLSVRV

SEQ ID NO: 1193 - protein, 11 aa, synthetic construct
  REGION 1..11: note = Description of Artificial Sequence: Syntheticpeptide
STWDDSLSVRV

SEQ ID NO: 1194 - protein, 11 aa, synthetic construct
  REGION 1..11: note = Description of Artificial Sequence: Syntheticpeptide
STWDDSLSVRV

SEQ ID NO: 1195 - protein, 11 aa, synthetic construct
  REGION 1..11: note = Description of Artificial Sequence: Syntheticpeptide
STWDDSLSVRV

SEQ ID NO: 1196 - protein, 11 aa, synthetic construct
  REGION 1..11: note = Description of Artificial Sequence: Syntheticpeptide
STWDDSLSVRV

SEQ ID NO: 1197 - protein, 11 aa, synthetic construct
  REGION 1..11: note = Description of Artificial Sequence: Syntheticpeptide
STWDDSLSVRV

SEQ ID NO: 1198 - protein, 11 aa, synthetic construct
  REGION 1..11: note = Description of Artificial Sequence: Syntheticpeptide
STWDDSLSVRV

SEQ ID NO: 1199 - protein, 11 aa, synthetic construct
  REGION 1..11: note = Description of Artificial Sequence: Syntheticpeptide
STWDDSLSVRV

SEQ ID NO: 1200 - protein, 11 aa, synthetic construct
  REGION 1..11: note = Description of Artificial Sequence: Syntheticpeptide
STWDDSLSVRV

SEQ ID NO: 1201 - protein, 11 aa, synthetic construct
  REGION 1..11: note = Description of Artificial Sequence: Syntheticpeptide
STWDDSLSVRV

SEQ ID NO: 1202 - protein, 11 aa, synthetic construct
  REGION 1..11: note = Description of Artificial Sequence: Syntheticpeptide
STWDDSLSVRV

SEQ ID NO: 1203 - protein, 11 aa, synthetic construct
  REGION 1..11: note = Description of Artificial Sequence: Syntheticpeptide
STWDDSLSVRV

SEQ ID NO: 1204 - protein, 11 aa, synthetic construct
  REGION 1..11: note = Description of Artificial Sequence: Syntheticpeptide
STWDDSLSVRV

SEQ ID NO: 1205 - protein, 11 aa, synthetic construct
  REGION 1..11: note = Description of Artificial Sequence: Syntheticpeptide
STWDDSLSVRV

SEQ ID NO: 1206 - protein, 11 aa, synthetic construct
  REGION 1..11: note = Description of Artificial Sequence: Syntheticpeptide
STWDDSLSVRV

SEQ ID NO: 1207 - protein, 11 aa, synthetic construct
  REGION 1..11: note = Description of Artificial Sequence: Syntheticpeptide
STWDDSLSVRV

SEQ ID NO: 1208 - protein, 11 aa, synthetic construct
  REGION 1..11: note = Description of Artificial Sequence: Syntheticpeptide
STWDDSLSVRV

SEQ ID NO: 1209 - protein, 11 aa, synthetic construct
  REGION 1..11: note = Description of Artificial Sequence: Syntheticpeptide
STWDDSLSVRV

SEQ ID NO: 1210 - protein, 11 aa, synthetic construct
  REGION 1..11: note = Description of Artificial Sequence: Syntheticpeptide
STWDDSLSVRV

SEQ ID NO: 1211 - protein, 11 aa, synthetic construct
  REGION 1..11: note = Description of Artificial Sequence: Syntheticpeptide
STWDDSLSVRV

SEQ ID NO: 1212 - protein, 11 aa, synthetic construct
  REGION 1..11: note = Description of Artificial Sequence: Syntheticpeptide
STWDDSLSVRV

SEQ ID NO: 1213 - protein, 11 aa, synthetic construct
  REGION 1..11: note = Description of Artificial Sequence: Syntheticpeptide
STWDDSLSVRV

SEQ ID NO: 1214 - protein, 11 aa, synthetic construct
  REGION 1..11: note = Description of Artificial Sequence: Syntheticpeptide
STWDDSLSVRV

SEQ ID NO: 1215 - protein, 11 aa, synthetic construct
  REGION 1..11: note = Description of Artificial Sequence: Syntheticpeptide
STWDDSLSVRV

SEQ ID NO: 1216 - protein, 11 aa, synthetic construct
  REGION 1..11: note = Description of Artificial Sequence: Syntheticpeptide
STWDDSLSVRV

SEQ ID NO: 1217 - protein, 11 aa, synthetic construct
  REGION 1..11: note = Description of Artificial Sequence: Syntheticpeptide
STWDDSLSVRV

SEQ ID NO: 1218 - protein, 11 aa, synthetic construct
  REGION 1..11: note = Description of Artificial Sequence: Syntheticpeptide
STWDDSLSVRV

SEQ ID NO: 1219 - protein, 11 aa, synthetic construct
  REGION 1..11: note = Description of Artificial Sequence: Syntheticpeptide
STWDDSLSVRV

SEQ ID NO: 1220 - protein, 11 aa, synthetic construct
  REGION 1..11: note = Description of Artificial Sequence: Syntheticpeptide
STWDDSLSVRV

SEQ ID NO: 1221 - protein, 11 aa, synthetic construct
  REGION 1..11: note = Description of Artificial Sequence: Syntheticpeptide
STWDDSLSVRV

SEQ ID NO: 1222 - protein, 11 aa, synthetic construct
  REGION 1..11: note = Description of Artificial Sequence: Syntheticpeptide
STWDDSLSVRV

SEQ ID NO: 1223 - protein, 11 aa, synthetic construct
  REGION 1..11: note = Description of Artificial Sequence: Syntheticpeptide
STWDDSLSVRV

SEQ ID NO: 1224 - protein, 11 aa, synthetic construct
  REGION 1..11: note = Description of Artificial Sequence: Syntheticpeptide
STWDDSLSVRV

SEQ ID NO: 1225 - protein, 11 aa, synthetic construct
  REGION 1..11: note = Description of Artificial Sequence: Syntheticpeptide
STWDDSLSVRV

SEQ ID NO: 1226 - protein, 11 aa, synthetic construct
  REGION 1..11: note = Description of Artificial Sequence: Syntheticpeptide
STWDDSLSVRV

SEQ ID NO: 1227 - protein, 11 aa, synthetic construct
  REGION 1..11: note = Description of Artificial Sequence: Syntheticpeptide
STWDDSLSVRV

SEQ ID NO: 1228 - protein, 11 aa, synthetic construct
  REGION 1..11: note = Description of Artificial Sequence: Syntheticpeptide
STWDDSLSVRV

SEQ ID NO: 1229 - protein, 11 aa, synthetic construct
  REGION 1..11: note = Description of Artificial Sequence: Syntheticpeptide
STWDDSLSVRV

SEQ ID NO: 1230 - protein, 11 aa, synthetic construct
  REGION 1..11: note = Description of Artificial Sequence: Syntheticpeptide
STWDDSLSVRV

SEQ ID NO: 1231 - protein, 11 aa, synthetic construct
  REGION 1..11: note = Description of Artificial Sequence: Syntheticpeptide
STWDDSLSVRV

SEQ ID NO: 1232 - protein, 11 aa, synthetic construct
  REGION 1..11: note = Description of Artificial Sequence: Syntheticpeptide
STWDDSLSVRV

SEQ ID NO: 1233 - protein, 11 aa, synthetic construct
  REGION 1..11: note = Description of Artificial Sequence: Syntheticpeptide
STWDDSLSVRV

SEQ ID NO: 1234 - protein, 11 aa, synthetic construct
  REGION 1..11: note = Description of Artificial Sequence: Syntheticpeptide
STWDDSLSVRV

SEQ ID NO: 1235 - protein, 11 aa, synthetic construct
  REGION 1..11: note = Description of Artificial Sequence: Syntheticpeptide
STWDDSLSVRV

SEQ ID NO: 1236 - protein, 11 aa, synthetic construct
  REGION 1..11: note = Description of Artificial Sequence: Syntheticpeptide
STWDDSLSVRV

SEQ ID NO: 1237 - protein, 11 aa, synthetic construct
  REGION 1..11: note = Description of Artificial Sequence: Syntheticpeptide
STWDDSLSVRV

SEQ ID NO: 1238 - protein, 11 aa, synthetic construct
  REGION 1..11: note = Description of Artificial Sequence: Syntheticpeptide
STWDDSLSVRV

SEQ ID NO: 1239 - protein, 11 aa, synthetic construct
  REGION 1..11: note = Description of Artificial Sequence: Syntheticpeptide
STWDDSLSVRV

SEQ ID NO: 1240 - protein, 11 aa, synthetic construct
  REGION 1..11: note = Description of Artificial Sequence: Syntheticpeptide
STWDDSLSVRV

SEQ ID NO: 1241 - protein, 11 aa, synthetic construct
  REGION 1..11: note = Description of Artificial Sequence: Syntheticpeptide
STWDDSLSVRV

SEQ ID NO: 1242 - protein, 11 aa, synthetic construct
  REGION 1..11: note = Description of Artificial Sequence: Syntheticpeptide
STWDDSLSVRV

SEQ ID NO: 1243 - protein, 11 aa, synthetic construct
  REGION 1..11: note = Description of Artificial Sequence: Syntheticpeptide
STWDDSLSVRV

SEQ ID NO: 1244 - protein, 11 aa, synthetic construct
  REGION 1..11: note = Description of Artificial Sequence: Syntheticpeptide
STWDDSLSVRV

SEQ ID NO: 1245 - protein, 11 aa, synthetic construct
  REGION 1..11: note = Description of Artificial Sequence: Syntheticpeptide
STWDDSLSVRV

SEQ ID NO: 1246 - protein, 11 aa, synthetic construct
  REGION 1..11: note = Description of Artificial Sequence: Syntheticpeptide
STWDDSLSVRV

SEQ ID NO: 1247 - protein, 11 aa, synthetic construct
  REGION 1..11: note = Description of Artificial Sequence: Syntheticpeptide
STWDDSLSVRV

SEQ ID NO: 1248 - protein, 11 aa, synthetic construct
  REGION 1..11: note = Description of Artificial Sequence: Syntheticpeptide
STWDDSLSVRV

SEQ ID NO: 1249 - protein, 11 aa, synthetic construct
  REGION 1..11: note = Description of Artificial Sequence: Syntheticpeptide
STWDDSLSVRV

SEQ ID NO: 1250 - protein, 11 aa, synthetic construct
  REGION 1..11: note = Description of Artificial Sequence: Syntheticpeptide
STWDDSLSVRV

SEQ ID NO: 1251 - protein, 11 aa, synthetic construct
  REGION 1..11: note = Description of Artificial Sequence: Syntheticpeptide
STWDDSLSVRV

SEQ ID NO: 1252 - protein, 11 aa, synthetic construct
  REGION 1..11: note = Description of Artificial Sequence: Syntheticpeptide
STWDDSLSVRV

SEQ ID NO: 1253 - protein, 11 aa, synthetic construct
  REGION 1..11: note = Description of Artificial Sequence: Syntheticpeptide
STWDDSLSVRV

SEQ ID NO: 1254 - protein, 11 aa, synthetic construct
  REGION 1..11: note = Description of Artificial Sequence: Syntheticpeptide
STWDDSLSVRV

SEQ ID NO: 1255 - protein, 11 aa, synthetic construct
  REGION 1..11: note = Description of Artificial Sequence: Syntheticpeptide
STWDDSLSVRV

SEQ ID NO: 1256 - protein, 11 aa, synthetic construct
  REGION 1..11: note = Description of Artificial Sequence: Syntheticpeptide
STWDDSLSVRV

SEQ ID NO: 1257 - protein, 11 aa, synthetic construct
  REGION 1..11: note = Description of Artificial Sequence: Syntheticpeptide
STWDDSLSVRV

SEQ ID NO: 1258 - protein, 11 aa, synthetic construct
  REGION 1..11: note = Description of Artificial Sequence: Syntheticpeptide
STWDDSLSVRV

SEQ ID NO: 1259 - protein, 11 aa, synthetic construct
  REGION 1..11: note = Description of Artificial Sequence: Syntheticpeptide
ATWDDSLSVRV

SEQ ID NO: 1260 - protein, 11 aa, synthetic construct
  REGION 1..11: note = Description of Artificial Sequence: Syntheticpeptide
SSWDDSLSVRV

SEQ ID NO: 1261 - protein, 11 aa, synthetic construct
  REGION 1..11: note = Description of Artificial Sequence: Syntheticpeptide
STFDDSLSVRV

SEQ ID NO: 1262 - protein, 11 aa, synthetic construct
  REGION 1..11: note = Description of Artificial Sequence: Syntheticpeptide
STWDNSLSVRV

SEQ ID NO: 1263 - protein, 11 aa, synthetic construct
  REGION 1..11: note = Description of Artificial Sequence: Syntheticpeptide
STWDDQLSVRV

SEQ ID NO: 1264 - protein, 11 aa, synthetic construct
  REGION 1..11: note = Description of Artificial Sequence: Syntheticpeptide
STWDDALSVRV

SEQ ID NO: 1265 - protein, 11 aa, synthetic construct
  REGION 1..11: note = Description of Artificial Sequence: Syntheticpeptide
STWDDDLSVRV

SEQ ID NO: 1266 - protein, 11 aa, synthetic construct
  REGION 1..11: note = Description of Artificial Sequence: Syntheticpeptide
STWDDSNSVRV

SEQ ID NO: 1267 - protein, 11 aa, synthetic construct
  REGION 1..11: note = Description of Artificial Sequence: Syntheticpeptide
STWDDSSSVRV

SEQ ID NO: 1268 - protein, 11 aa, synthetic construct
  REGION 1..11: note = Description of Artificial Sequence: Syntheticpeptide
STWDDSLNVRV

SEQ ID NO: 1269 - protein, 11 aa, synthetic construct
  REGION 1..11: note = Description of Artificial Sequence: Syntheticpeptide
STWDDSLLVRV

SEQ ID NO: 1270 - protein, 11 aa, synthetic construct
  REGION 1..11: note = Description of Artificial Sequence: Syntheticpeptide
STWDDSLTVRV

SEQ ID NO: 1271 - protein, 11 aa, synthetic construct
  REGION 1..11: note = Description of Artificial Sequence: Syntheticpeptide
STWDDSLSIRV

SEQ ID NO: 1272 - protein, 11 aa, synthetic construct
  REGION 1..11: note = Description of Artificial Sequence: Syntheticpeptide
STWDDSLSVKV

SEQ ID NO: 1273 - protein, 11 aa, synthetic construct
  REGION 1..11: note = Description of Artificial Sequence: Syntheticpeptide
STWDDSLSVWV

SEQ ID NO: 1274 - protein, 11 aa, synthetic construct
  REGION 1..11: note = Description of Artificial Sequence: Syntheticpeptide
STWDDSLSVHV

SEQ ID NO: 1275 - protein, 11 aa, synthetic construct
  REGION 1..11: note = Description of Artificial Sequence: Syntheticpeptide
STWDDSLSVQV

SEQ ID NO: 1276 - protein, 11 aa, synthetic construct
  REGION 1..11: note = Description of Artificial Sequence: Syntheticpeptide
STWDDSLSVRI

SEQ ID NO: 1277 - protein, 11 aa, synthetic construct
  REGION 1..11: note = Description of Artificial Sequence: Syntheticpeptide
STWNDQLSVRV

SEQ ID NO: 1278 - protein, 11 aa, synthetic construct
  REGION 1..11: note = Description of Artificial Sequence: Syntheticpeptide
STWDDSLSVRV

SEQ ID NO: 1279 - protein, 11 aa, synthetic construct
  REGION 1..11: note = Description of Artificial Sequence: Syntheticpeptide
STWDDSLSVRV

SEQ ID NO: 1280 - protein, 11 aa, synthetic construct
  REGION 1..11: note = Description of Artificial Sequence: Syntheticpeptide
STWDDSLSVRV

SEQ ID NO: 1281 - protein, 11 aa, synthetic construct
  REGION 1..11: note = Description of Artificial Sequence: Syntheticpeptide
STWDDSLSVRV

SEQ ID NO: 1282 - protein, 11 aa, synthetic construct
  REGION 1..11: note = Description of Artificial Sequence: Syntheticpeptide
STWDDSLSVRV

SEQ ID NO: 1283 - protein, 11 aa, synthetic construct
  REGION 1..11: note = Description of Artificial Sequence: Syntheticpeptide
STWDDSLSVRV

SEQ ID NO: 1284 - protein, 11 aa, synthetic construct
  REGION 1..11: note = Description of Artificial Sequence: Syntheticpeptide
STWDDSLSVRV

SEQ ID NO: 1285 - protein, 11 aa, synthetic construct
  REGION 1..11: note = Description of Artificial Sequence: Syntheticpeptide
STWDDSLSVRV

SEQ ID NO: 1286 - protein, 11 aa, synthetic construct
  REGION 1..11: note = Description of Artificial Sequence: Syntheticpeptide
STWDDSLSVRV

SEQ ID NO: 1287 - protein, 11 aa, synthetic construct
  REGION 1..11: note = Description of Artificial Sequence: Syntheticpeptide
STWDDSLSVRV

SEQ ID NO: 1288 - protein, 11 aa, synthetic construct
  REGION 1..11: note = Description of Artificial Sequence: Syntheticpeptide
STWDDSLSVRV

SEQ ID NO: 1289 - protein, 11 aa, synthetic construct
  REGION 1..11: note = Description of Artificial Sequence: Syntheticpeptide
STWDDSLSVRV

SEQ ID NO: 1290 - protein, 11 aa, synthetic construct
  REGION 1..11: note = Description of Artificial Sequence: Syntheticpeptide
STWDDSLSVRV

SEQ ID NO: 1291 - protein, 11 aa, synthetic construct
  REGION 1..11: note = Description of Artificial Sequence: Syntheticpeptide
STWDDSLSVRV

SEQ ID NO: 1292 - protein, 11 aa, synthetic construct
  REGION 1..11: note = Description of Artificial Sequence: Syntheticpeptide
STWDDSLSVRV

SEQ ID NO: 1293 - protein, 11 aa, synthetic construct
  REGION 1..11: note = Description of Artificial Sequence: Syntheticpeptide
STWDDSLSVRV

SEQ ID NO: 1294 - protein, 11 aa, synthetic construct
  REGION 1..11: note = Description of Artificial Sequence: Syntheticpeptide
STWDDSLSVRV

SEQ ID NO: 1295 - protein, 11 aa, synthetic construct
  REGION 1..11: note = Description of Artificial Sequence: Syntheticpeptide
STWDDSLSVRV

SEQ ID NO: 1296 - protein, 11 aa, synthetic construct
  REGION 1..11: note = Description of Artificial Sequence: Syntheticpeptide
STWDDSLSVRV

SEQ ID NO: 1297 - protein, 11 aa, synthetic construct
  REGION 1..11: note = Description of Artificial Sequence: Syntheticpeptide
STWDDSLSVRV

SEQ ID NO: 1298 - protein, 11 aa, synthetic construct
  REGION 1..11: note = Description of Artificial Sequence: Syntheticpeptide
STWDDSLSVRV

SEQ ID NO: 1299 - protein, 11 aa, synthetic construct
  REGION 1..11: note = Description of Artificial Sequence: Syntheticpeptide
STWDDSLSVRV

SEQ ID NO: 1300 - protein, 11 aa, synthetic construct
  REGION 1..11: note = Description of Artificial Sequence: Syntheticpeptide
STWDDSLSVRV

SEQ ID NO: 1301 - protein, 11 aa, synthetic construct
  REGION 1..11: note = Description of Artificial Sequence: Syntheticpeptide
STWDDSLSVRV

SEQ ID NO: 1302 - protein, 11 aa, synthetic construct
  REGION 1..11: note = Description of Artificial Sequence: Syntheticpeptide
STWDDSLSVRV

SEQ ID NO: 1303 - protein, 11 aa, synthetic construct
  REGION 1..11: note = Description of Artificial Sequence: Syntheticpeptide
STWDDSLSVRV

SEQ ID NO: 1304 - protein, 11 aa, synthetic construct
  REGION 1..11: note = Description of Artificial Sequence: Syntheticpeptide
STWDDSLSVRV

SEQ ID NO: 1305 - protein, 11 aa, synthetic construct
  REGION 1..11: note = Description of Artificial Sequence: Syntheticpeptide
STWDDSLSVRV

SEQ ID NO: 1306 - protein, 11 aa, synthetic construct
  REGION 1..11: note = Description of Artificial Sequence: Syntheticpeptide
STWDDSLSVRV

SEQ ID NO: 1307 - protein, 11 aa, synthetic construct
  REGION 1..11: note = Description of Artificial Sequence: Syntheticpeptide
STWDDSLSVRV

SEQ ID NO: 1308 - protein, 11 aa, synthetic construct
  REGION 1..11: note = Description of Artificial Sequence: Syntheticpeptide
STWDDSLSVRV

SEQ ID NO: 1309 - protein, 11 aa, synthetic construct
  REGION 1..11: note = Description of Artificial Sequence: Syntheticpeptide
STWDDSLSVRV

SEQ ID NO: 1310 - protein, 11 aa, synthetic construct
  REGION 1..11: note = Description of Artificial Sequence: Syntheticpeptide
STWDDSLSVRV

SEQ ID NO: 1311 - protein, 11 aa, synthetic construct
  REGION 1..11: note = Description of Artificial Sequence: Syntheticpeptide
STWDDSLSVRV

SEQ ID NO: 1312 - protein, 11 aa, synthetic construct
  REGION 1..11: note = Description of Artificial Sequence: Syntheticpeptide
STWDDSLSVRV

SEQ ID NO: 1313 - protein, 11 aa, synthetic construct
  REGION 1..11: note = Description of Artificial Sequence: Syntheticpeptide
STWDDSLSVRV

SEQ ID NO: 1314 - protein, 11 aa, synthetic construct
  REGION 1..11: note = Description of Artificial Sequence: Syntheticpeptide
STWDDSLSVRV

SEQ ID NO: 1315 - protein, 11 aa, synthetic construct
  REGION 1..11: note = Description of Artificial Sequence: Syntheticpeptide
STWDDSLSVRV

SEQ ID NO: 1316 - protein, 11 aa, synthetic construct
  REGION 1..11: note = Description of Artificial Sequence: Syntheticpeptide
STWDDSLSVRV

SEQ ID NO: 1317 - protein, 11 aa, synthetic construct
  REGION 1..11: note = Description of Artificial Sequence: Syntheticpeptide
STWDDSLSVRV

SEQ ID NO: 1318 - protein, 11 aa, synthetic construct
  REGION 1..11: note = Description of Artificial Sequence: Syntheticpeptide
STWDDSLSVRV

SEQ ID NO: 1319 - protein, 11 aa, synthetic construct
  REGION 1..11: note = Description of Artificial Sequence: Syntheticpeptide
STWDDSLSVRV

SEQ ID NO: 1320 - protein, 11 aa, synthetic construct
  REGION 1..11: note = Description of Artificial Sequence: Syntheticpeptide
STWDDSLSVRV

SEQ ID NO: 1321 - protein, 11 aa, synthetic construct
  REGION 1..11: note = Description of Artificial Sequence: Syntheticpeptide
STWDDSLSVRV

SEQ ID NO: 1322 - protein, 11 aa, synthetic construct
  REGION 1..11: note = Description of Artificial Sequence: Syntheticpeptide
STWDDSLSVRV

SEQ ID NO: 1323 - protein, 11 aa, synthetic construct
  REGION 1..11: note = Description of Artificial Sequence: Syntheticpeptide
STWDDSLSVRV

SEQ ID NO: 1324 - protein, 11 aa, synthetic construct
  REGION 1..11: note = Description of Artificial Sequence: Syntheticpeptide
STWDDSLSVRV

SEQ ID NO: 1325 - protein, 11 aa, synthetic construct
  REGION 1..11: note = Description of Artificial Sequence: Syntheticpeptide
STWDDSLSVRV

SEQ ID NO: 1326 - protein, 11 aa, synthetic construct
  REGION 1..11: note = Description of Artificial Sequence: Syntheticpeptide
STWDDSLSVRV

SEQ ID NO: 1327 - protein, 11 aa, synthetic construct
  REGION 1..11: note = Description of Artificial Sequence: Syntheticpeptide
STWDDALSIRV

SEQ ID NO: 1328 - protein, 11 aa, synthetic construct
  REGION 1..11: note = Description of Artificial Sequence: Syntheticpeptide
STWDDALNVRV

SEQ ID NO: 1329 - protein, 11 aa, synthetic construct
  REGION 1..11: note = Description of Artificial Sequence: Syntheticpeptide
SSWDDSSLVRV

SEQ ID NO: 1330 - protein, 11 aa, synthetic construct
  REGION 1..11: note = Description of Artificial Sequence: Syntheticpeptide
ATWDNSLSIRV

SEQ ID NO: 1331 - protein, 11 aa, synthetic construct
  REGION 1..11: note = Description of Artificial Sequence: Syntheticpeptide
STWDDALSVRV

SEQ ID NO: 1332 - protein, 11 aa, synthetic construct
  REGION 1..11: note = Description of Artificial Sequence: Syntheticpeptide
STWDDSLSVRV

SEQ ID NO: 1333 - protein, 140 aa, synthetic construct
  REGION 1..140: note = Description of Artificial Sequence: Syntheticpolypeptide
EVQLVESGGALVKPGGSLRLSCAASGFTFSKAWMTWVRQAPGKGLEWVGRIKSVTEGETTDYAAPVKGRFTISRDDSKSVLYLQMSSLKTEDTAVYFCTSSFCCRGGSCPSHDTSFCGGQDKRYYYMDVWGKGTTVTVSS

SEQ ID NO: 1334 - protein, 140 aa, synthetic construct
  REGION 1..140: note = Description of Artificial Sequence: Syntheticpolypeptide
EVQLVESGGALVKPGGSLRLSCAASGFTFSKAWMTWVRQAPGKGLEWVGRIKSVTEGETTDYAAPVKGRFTISRDDSKSTLYLQMNSLKTEDTAVYYCTSSFCCRGGSCPSHDTSFCGGQDKRYYYMDVWGKGTTVTVSS

SEQ ID NO: 1335 - protein, 140 aa, synthetic construct; identical to SEQ ID NO: 107
  REGION 1..140: note = Description of Artificial Sequence: Syntheticpolypeptide

SEQ ID NO: 1336 - protein, 140 aa, synthetic construct; identical to SEQ ID NO: 94
  REGION 1..140: note = Description of Artificial Sequence: Syntheticpolypeptide

SEQ ID NO: 1337 - protein, 140 aa, synthetic construct
  REGION 1..140: note = Description of Artificial Sequence: Syntheticpolypeptide
EVQLVESGGALVKPGGSLRLSCAASGYTFSKAWMSWVRQAPGKGLEWVGRIKSVTDGETTDYAAPVKGRFTISRDDSKSTLYLQMNSLKTEDTAVYYCTSSFCCRGGSCPSHDTSYCGGQYKSYYYMDVWGKGTTVTVSS

SEQ ID NO: 1338 - protein, 140 aa, synthetic construct
  REGION 1..140: note = Description of Artificial Sequence: Syntheticpolypeptide
EVQLVESGGALVKPGGSLRLSCAASGFDFSKAWMSWVRQAPGKGLEWVGRIKSVTDGETTDYAAPVKGRFTISRDDSKSTLYLQMNSLKTEDTAVYYCTSSFCCRGGSCPSHDTSYCGGQYKSYYYMDVWGKGTTVTVSS

SEQ ID NO: 1339 - protein, 140 aa, synthetic construct
  REGION 1..140: note = Description of Artificial Sequence: Syntheticpolypeptide
EVQLVESGGALVKPGGSLRLSCAASGFVFSKAWMSWVRQAPGKGLEWVGRIKSVTDGETTDYAAPVKGRFTISRDDSKSTLYLQMNSLKTEDTAVYYCTSSFCCRGGSCPSHDTSYCGGQYKSYYYMDVWGKGTTVTVSS

SEQ ID NO: 1340 - protein, 140 aa, synthetic construct
  REGION 1..140: note = Description of Artificial Sequence: Syntheticpolypeptide
EVQLVESGGALVKPGGSLRLSCAASGFTYSKAWMSWVRQAPGKGLEWVGRIKSVTDGETTDYAAPVKGRFTISRDDSKSTLYLQMNSLKTEDTAVYYCTSSFCCRGGSCPSHDTSYCGGQYKSYYYMDVWGKGTTVTVSS

SEQ ID NO: 1341 - protein, 140 aa, synthetic construct
  REGION 1..140: note = Description of Artificial Sequence: Syntheticpolypeptide
EVQLVESGGALVKPGGSLRLSCAASGFTFAKAWMSWVRQAPGKGLEWVGRIKSVTDGETTDYAAPVKGRFTISRDDSKSTLYLQMNSLKTEDTAVYYCTSSFCCRGGSCPSHDTSYCGGQYKSYYYMDVWGKGTTVTVSS

SEQ ID NO: 1342 - protein, 140 aa, synthetic construct
  REGION 1..140: note = Description of Artificial Sequence: Syntheticpolypeptide
EVQLVESGGALVKPGGSLRLSCAASGFTFSNAWMSWVRQAPGKGLEWVGRIKSVTDGETTDYAAPVKGRFTISRDDSKSTLYLQMNSLKTEDTAVYYCTSSFCCRGGSCPSHDTSYCGGQYKSYYYMDVWGKGTTVTVSS

SEQ ID NO: 1343 - protein, 140 aa, synthetic construct
  REGION 1..140: note = Description of Artificial Sequence: Syntheticpolypeptide
EVQLVESGGALVKPGGSLRLSCAASGFTFSRAWMSWVRQAPGKGLEWVGRIKSVTDGETTDYAAPVKGRFTISRDDSKSTLYLQMNSLKTEDTAVYYCTSSFCCRGGSCPSHDTSYCGGQYKSYYYMDVWGKGTTVTVSS

SEQ ID NO: 1344 - protein, 140 aa, synthetic construct
  REGION 1..140: note = Description of Artificial Sequence: Syntheticpolypeptide
EVQLVESGGALVKPGGSLRLSCAASGFTFSMAWMSWVRQAPGKGLEWVGRIKSVTDGETTDYAAPVKGRFTISRDDSKSTLYLQMNSLKTEDTAVYYCTSSFCCRGGSCPSHDTSYCGGQYKSYYYMDVWGKGTTVTVSS

SEQ ID NO: 1345 - protein, 140 aa, synthetic construct
  REGION 1..140: note = Description of Artificial Sequence: Syntheticpolypeptide
EVQLVESGGALVKPGGSLRLSCAASGFTFSAAWMSWVRQAPGKGLEWVGRIKSVTDGETTDYAAPVKGRFTISRDDSKSTLYLQMNSLKTEDTAVYYCTSSFCCRGGSCPSHDTSYCGGQYKSYYYMDVWGKGTTVTVSS

SEQ ID NO: 1346 - protein, 140 aa, synthetic construct
  REGION 1..140: note = Description of Artificial Sequence: Syntheticpolypeptide
EVQLVESGGALVKPGGSLRLSCAASGFTFSHAWMSWVRQAPGKGLEWVGRIKSVTDGETTDYAAPVKGRFTISRDDSKSTLYLQMNSLKTEDTAVYYCTSSFCCRGGSCPSHDTSYCGGQYKSYYYMDVWGKGTTVTVSS

SEQ ID NO: 1347 - protein, 140 aa, synthetic construct; identical to SEQ ID NO: 1346
  REGION 1..140: note = Description of Artificial Sequence: Syntheticpolypeptide

SEQ ID NO: 1348 - protein, 140 aa, synthetic construct
  REGION 1..140: note = Description of Artificial Sequence: Syntheticpolypeptide
EVQLVESGGALVKPGGSLRLSCAASGFTFSKAYMSWVRQAPGKGLEWVGRIKSVTDGETTDYAAPVKGRFTISRDDSKSTLYLQMNSLKTEDTAVYYCTSSFCCRGGSCPSHDTSYCGGQYKSYYYMDVWGKGTTVTVSS

SEQ ID NO: 1349 - protein, 140 aa, synthetic construct
  REGION 1..140: note = Description of Artificial Sequence: Syntheticpolypeptide
EVQLVESGGALVKPGGSLRLSCAASGFTFSKAWFSWVRQAPGKGLEWVGRIKSVTDGETTDYAAPVKGRFTISRDDSKSTLYLQMNSLKTEDTAVYYCTSSFCCRGGSCPSHDTSYCGGQYKSYYYMDVWGKGTTVTVSS

SEQ ID NO: 1350 - protein, 140 aa, synthetic construct
  REGION 1..140: note = Description of Artificial Sequence: Syntheticpolypeptide
EVQLVESGGALVKPGGSLRLSCAASGFTFSKAWMSWVRQAPGKGLEWVGRIQSVTDGETTDYAAPVKGRFTISRDDSKSTLYLQMNSLKTEDTAVYYCTSSFCCRGGSCPSHDTSYCGGQYKSYYYMDVWGKGTTVTVSS

SEQ ID NO: 1351 - protein, 140 aa, synthetic construct
  REGION 1..140: note = Description of Artificial Sequence: Syntheticpolypeptide
EVQLVESGGALVKPGGSLRLSCAASGFTFSKAWMSWVRQAPGKGLEWVGRIKAVTDGETTDYAAPVKGRFTISRDDSKSTLYLQMNSLKTEDTAVYYCTSSFCCRGGSCPSHDTSYCGGQYKSYYYMDVWGKGTTVTVSS

SEQ ID NO: 1352 - protein, 140 aa, synthetic construct
  REGION 1..140: note = Description of Artificial Sequence: Syntheticpolypeptide
EVQLVESGGALVKPGGSLRLSCAASGFTFSKAWMSWVRQAPGKGLEWVGRIKSATDGETTDYAAPVKGRFTISRDDSKSTLYLQMNSLKTEDTAVYYCTSSFCCRGGSCPSHDTSYCGGQYKSYYYMDVWGKGTTVTVSS

SEQ ID NO: 1353 - protein, 140 aa, synthetic construct
  REGION 1..140: note = Description of Artificial Sequence: Syntheticpolypeptide
EVQLVESGGALVKPGGSLRLSCAASGFTFSKAWMSWVRQAPGKGLEWVGRIKSNTDGETTDYAAPVKGRFTISRDDSKSTLYLQMNSLKTEDTAVYYCTSSFCCRGGSCPSHDTSYCGGQYKSYYYMDVWGKGTTVTVSS

SEQ ID NO: 1354 - protein, 140 aa, synthetic construct
  REGION 1..140: note = Description of Artificial Sequence: Syntheticpolypeptide
EVQLVESGGALVKPGGSLRLSCAASGFTFSKAWMSWVRQAPGKGLEWVGRIKSVHDGETTDYAAPVKGRFTISRDDSKSTLYLQMNSLKTEDTAVYYCTSSFCCRGGSCPSHDTSYCGGQYKSYYYMDVWGKGTTVTVSS

SEQ ID NO: 1355 - protein, 140 aa, synthetic construct
  REGION 1..140: note = Description of Artificial Sequence: Syntheticpolypeptide
EVQLVESGGALVKPGGSLRLSCAASGFTFSKAWMSWVRQAPGKGLEWVGRIKSVDDGETTDYAAPVKGRFTISRDDSKSTLYLQMNSLKTEDTAVYYCTSSFCCRGGSCPSHDTSYCGGQYKSYYYMDVWGKGTTVTVSS

SEQ ID NO: 1356 - protein, 140 aa, synthetic construct
  REGION 1..140: note = Description of Artificial Sequence: Syntheticpolypeptide
EVQLVESGGALVKPGGSLRLSCAASGFTFSKAWMSWVRQAPGKGLEWVGRIKSVQDGETTDYAAPVKGRFTISRDDSKSTLYLQMNSLKTEDTAVYYCTSSFCCRGGSCPSHDTSYCGGQYKSYYYMDVWGKGTTVTVSS

SEQ ID NO: 1357 - protein, 140 aa, synthetic construct
  REGION 1..140: note = Description of Artificial Sequence: Syntheticpolypeptide
EVQLVESGGALVKPGGSLRLSCAASGFTFSKAWMSWVRQAPGKGLEWVGRIKSVTNGETTDYAAPVKGRFTISRDDSKSTLYLQMNSLKTEDTAVYYCTSSFCCRGGSCPSHDTSYCGGQYKSYYYMDVWGKGTTVTVSS

SEQ ID NO: 1358 - protein, 140 aa, synthetic construct
  REGION 1..140: note = Description of Artificial Sequence: Syntheticpolypeptide
EVQLVESGGALVKPGGSLRLSCAASGFTFSKAWMSWVRQAPGKGLEWVGRIKSVTDAETTDYAAPVKGRFTISRDDSKSTLYLQMNSLKTEDTAVYYCTSSFCCRGGSCPSHDTSYCGGQYKSYYYMDVWGKGTTVTVSS

SEQ ID NO: 1359 - protein, 140 aa, synthetic construct
  REGION 1..140: note = Description of Artificial Sequence: Syntheticpolypeptide
EVQLVESGGALVKPGGSLRLSCAASGFTFSKAWMSWVRQAPGKGLEWVGRIKSVTDGQTTDYAAPVKGRFTISRDDSKSTLYLQMNSLKTEDTAVYYCTSSFCCRGGSCPSHDTSYCGGQYKSYYYMDVWGKGTTVTVSS

SEQ ID NO: 1360 - protein, 140 aa, synthetic construct
  REGION 1..140: note = Description of Artificial Sequence: Syntheticpolypeptide
EVQLVESGGALVKPGGSLRLSCAASGFTFSKAWMSWVRQAPGKGLEWVGRIKSVTDGHTTDYAAPVKGRFTISRDDSKSTLYLQMNSLKTEDTAVYYCTSSFCCRGGSCPSHDTSYCGGQYKSYYYMDVWGKGTTVTVSS

SEQ ID NO: 1361 - protein, 140 aa, synthetic construct; identical to SEQ ID NO: 118
  REGION 1..140: note = Description of Artificial Sequence: Syntheticpolypeptide

SEQ ID NO: 1362 - protein, 140 aa, synthetic construct
  REGION 1..140: note = Description of Artificial Sequence: Syntheticpolypeptide
EVQLVESGGALVKPGGSLRLSCAASGFTFSKAWMSWVRQAPGKGLEWVGRIKSVTDGEATDYAAPVKGRFTISRDDSKSTLYLQMNSLKTEDTAVYYCTSSFCCRGGSCPSHDTSYCGGQYKSYYYMDVWGKGTTVTVSS

SEQ ID NO: 1363 - protein, 140 aa, synthetic construct
  REGION 1..140: note = Description of Artificial Sequence: Syntheticpolypeptide
EVQLVESGGALVKPGGSLRLSCAASGFTFSKAWMSWVRQAPGKGLEWVGRIKSVTDGETTDYASPVKGRFTISRDDSKSTLYLQMNSLKTEDTAVYYCTSSFCCRGGSCPSHDTSYCGGQYKSYYYMDVWGKGTTVTVSS

SEQ ID NO: 1364 - protein, 140 aa, synthetic construct
  REGION 1..140: note = Description of Artificial Sequence: Syntheticpolypeptide
EVQLVESGGALVKPGGSLRLSCAASGFTFSKAWMSWVRQAPGKGLEWVGRIKSVTDGETTDYAAPVQGRFTISRDDSKSTLYLQMNSLKTEDTAVYYCTSSFCCRGGSCPSHDTSYCGGQYKSYYYMDVWGKGTTVTVSS

SEQ ID NO: 1365 - protein, 140 aa, synthetic construct
  REGION 1..140: note = Description of Artificial Sequence: Syntheticpolypeptide
EVQLVESGGALVKPGGSLRLSCAASGFTFSKAWMSWVRQAPGKGLEWVGRIKSVTDGETTDYAAPVKGRFTISRDDSKSTLYLQMNSLKTEDTAVYYCISSFCCRGGSCPSHDTSYCGGQYKSYYYMDVWGKGTTVTVSS

SEQ ID NO: 1366 - protein, 140 aa, synthetic construct
  REGION 1..140: note = Description of Artificial Sequence: Syntheticpolypeptide
EVQLVESGGALVKPGGSLRLSCAASGFTFSKAWMSWVRQAPGKGLEWVGRIKSVTDGETTDYAAPVKGRFTISRDDSKSTLYLQMNSLKTEDTAVYYCTTSFCCRGGSCPSHDTSYCGGQYKSYYYMDVWGKGTTVTVSS

SEQ ID NO: 1367 - protein, 140 aa, synthetic construct
  REGION 1..140: note = Description of Artificial Sequence: Syntheticpolypeptide
EVQLVESGGALVKPGGSLRLSCAASGFTFSKAWMSWVRQAPGKGLEWVGRIKSVTDGETTDYAAPVKGRFTISRDDSKSTLYLQMNSLKTEDTAVYYCTSPFCCRGGSCPSHDTSYCGGQYKSYYYMDVWGKGTTVTVSS

SEQ ID NO: 1368 - protein, 140 aa, synthetic construct
  REGION 1..140: note = Description of Artificial Sequence: Syntheticpolypeptide
EVQLVESGGALVKPGGSLRLSCAASGFTFSKAWMSWVRQAPGKGLEWVGRIKSVTDGETTDYAAPVKGRFTISRDDSKSTLYLQMNSLKTEDTAVYYCTSAFCCRGGSCPSHDTSYCGGQYKSYYYMDVWGKGTTVTVSS

SEQ ID NO: 1369 - protein, 140 aa, synthetic construct
  REGION 1..140: note = Description of Artificial Sequence: Syntheticpolypeptide
EVQLVESGGALVKPGGSLRLSCAASGFTFSKAWMSWVRQAPGKGLEWVGRIKSVTDGETTDYAAPVKGRFTISRDDSKSTLYLQMNSLKTEDTAVYYCTSSYCCRGGSCPSHDTSYCGGQYKSYYYMDVWGKGTTVTVSS

SEQ ID NO: 1370 - protein, 140 aa, synthetic construct
  REGION 1..140: note = Description of Artificial Sequence: Syntheticpolypeptide
EVQLVESGGALVKPGGSLRLSCAASGFTFSKAWMSWVRQAPGKGLEWVGRIKSVTDGETTDYAAPVKGRFTISRDDSKSTLYLQMNSLKTEDTAVYYCTSSFCCLGGSCPSHDTSYCGGQYKSYYYMDVWGKGTTVTVSS

SEQ ID NO: 1371 - protein, 140 aa, synthetic construct
  REGION 1..140: note = Description of Artificial Sequence: Syntheticpolypeptide
EVQLVESGGALVKPGGSLRLSCAASGFTFSKAWMSWVRQAPGKGLEWVGRIKSVTDGETTDYAAPVKGRFTISRDDSKSTLYLQMNSLKTEDTAVYYCTSSFCCHGGSCPSHDTSYCGGQYKSYYYMDVWGKGTTVTVSS

SEQ ID NO: 1372 - protein, 140 aa, synthetic construct
  REGION 1..140: note = Description of Artificial Sequence: Syntheticpolypeptide
EVQLVESGGALVKPGGSLRLSCAASGFTFSKAWMSWVRQAPGKGLEWVGRIKSVTDGETTDYAAPVKGRFTISRDDSKSTLYLQMNSLKTEDTAVYYCTSSFCCQGGSCPSHDTSYCGGQYKSYYYMDVWGKGTTVTVSS

SEQ ID NO: 1373 - protein, 140 aa, synthetic construct
  REGION 1..140: note = Description of Artificial Sequence: Syntheticpolypeptide
EVQLVESGGALVKPGGSLRLSCAASGFTFSKAWMSWVRQAPGKGLEWVGRIKSVTDGETTDYAAPVKGRFTISRDDSKSTLYLQMNSLKTEDTAVYYCTSSFCCRSGSCPSHDTSYCGGQYKSYYYMDVWGKGTTVTVSS

SEQ ID NO: 1374 - protein, 140 aa, synthetic construct
  REGION 1..140: note = Description of Artificial Sequence: Syntheticpolypeptide
EVQLVESGGALVKPGGSLRLSCAASGFTFSKAWMSWVRQAPGKGLEWVGRIKSVTDGETTDYAAPVKGRFTISRDDSKSTLYLQMNSLKTEDTAVYYCTSSFCCRGASCPSHDTSYCGGQYKSYYYMDVWGKGTTVTVSS

SEQ ID NO: 1375 - protein, 140 aa, synthetic construct
  REGION 1..140: note = Description of Artificial Sequence: Syntheticpolypeptide
EVQLVESGGALVKPGGSLRLSCAASGFTFSKAWMSWVRQAPGKGLEWVGRIKSVTDGETTDYAAPVKGRFTISRDDSKSTLYLQMNSLKTEDTAVYYCTSSFCCRGKSCPSHDTSYCGGQYKSYYYMDVWGKGTTVTVSS

SEQ ID NO: 1376 - protein, 140 aa, synthetic construct
  REGION 1..140: note = Description of Artificial Sequence: Syntheticpolypeptide
EVQLVESGGALVKPGGSLRLSCAASGFTFSKAWMSWVRQAPGKGLEWVGRIKSVTDGETTDYAAPVKGRFTISRDDSKSTLYLQMNSLKTEDTAVYYCTSSFCCRGNSCPSHDTSYCGGQYKSYYYMDVWGKGTTVTVSS

SEQ ID NO: 1377 - protein, 140 aa, synthetic construct
  REGION 1..140: note = Description of Artificial Sequence: Syntheticpolypeptide
EVQLVESGGALVKPGGSLRLSCAASGFTFSKAWMSWVRQAPGKGLEWVGRIKSVTDGETTDYAAPVKGRFTISRDDSKSTLYLQMNSLKTEDTAVYYCTSSFCCRGGNCPSHDTSYCGGQYKSYYYMDVWGKGTTVTVSS

SEQ ID NO: 1378 - protein, 140 aa, synthetic construct
  REGION 1..140: note = Description of Artificial Sequence: Syntheticpolypeptide
EVQLVESGGALVKPGGSLRLSCAASGFTFSKAWMSWVRQAPGKGLEWVGRIKSVTDGETTDYAAPVKGRFTISRDDSKSTLYLQMNSLKTEDTAVYYCTSSFCCRGGQCPSHDTSYCGGQYKSYYYMDVWGKGTTVTVSS

SEQ ID NO: 1379 - protein, 140 aa, synthetic construct
  REGION 1..140: note = Description of Artificial Sequence: Syntheticpolypeptide
EVQLVESGGALVKPGGSLRLSCAASGFTFSKAWMSWVRQAPGKGLEWVGRIKSVTDGETTDYAAPVKGRFTISRDDSKSTLYLQMNSLKTEDTAVYYCTSSFCCRGGACPSHDTSYCGGQYKSYYYMDVWGKGTTVTVSS

SEQ ID NO: 1380 - protein, 140 aa, synthetic construct
  REGION 1..140: note = Description of Artificial Sequence: Syntheticpolypeptide
EVQLVESGGALVKPGGSLRLSCAASGFTFSKAWMSWVRQAPGKGLEWVGRIKSVTDGETTDYAAPVKGRFTISRDDSKSTLYLQMNSLKTEDTAVYYCTSSFCCRGGSCASHDTSYCGGQYKSYYYMDVWGKGTTVTVSS

SEQ ID NO: 1381 - protein, 140 aa, synthetic construct
  REGION 1..140: note = Description of Artificial Sequence: Syntheticpolypeptide
EVQLVESGGALVKPGGSLRLSCAASGFTFSKAWMSWVRQAPGKGLEWVGRIKSVTDGETTDYAAPVKGRFTISRDDSKSTLYLQMNSLKTEDTAVYYCTSSFCCRGGSCLSHDTSYCGGQYKSYYYMDVWGKGTTVTVSS

SEQ ID NO: 1382 - protein, 140 aa, synthetic construct
  REGION 1..140: note = Description of Artificial Sequence: Syntheticpolypeptide
EVQLVESGGALVKPGGSLRLSCAASGFTFSKAWMSWVRQAPGKGLEWVGRIKSVTDGETTDYAAPVKGRFTISRDDSKSTLYLQMNSLKTEDTAVYYCTSSFCCRGGSCPAHDTSYCGGQYKSYYYMDVWGKGTTVTVSS

SEQ ID NO: 1383 - protein, 140 aa, synthetic construct
  REGION 1..140: note = Description of Artificial Sequence: Syntheticpolypeptide
EVQLVESGGALVKPGGSLRLSCAASGFTFSKAWMSWVRQAPGKGLEWVGRIKSVTDGETTDYAAPVKGRFTISRDDSKSTLYLQMNSLKTEDTAVYYCTSSFCCRGGSCPNHDTSYCGGQYKSYYYMDVWGKGTTVTVSS

SEQ ID NO: 1384 - protein, 140 aa, synthetic construct
  REGION 1..140: note = Description of Artificial Sequence: Syntheticpolypeptide
EVQLVESGGALVKPGGSLRLSCAASGFTFSKAWMSWVRQAPGKGLEWVGRIKSVTDGETTDYAAPVKGRFTISRDDSKSTLYLQMNSLKTEDTAVYYCTSSFCCRGGSCPSSDTSYCGGQYKSYYYMDVWGKGTTVTVSS

SEQ ID NO: 1385 - protein, 140 aa, synthetic construct
  REGION 1..140: note = Description of Artificial Sequence: Syntheticpolypeptide
EVQLVESGGALVKPGGSLRLSCAASGFTFSKAWMSWVRQAPGKGLEWVGRIKSVTDGETTDYAAPVKGRFTISRDDSKSTLYLQMNSLKTEDTAVYYCTSSFCCRGGSCPSQDTSYCGGQYKSYYYMDVWGKGTTVTVSS

SEQ ID NO: 1386 - protein, 140 aa, synthetic construct
  REGION 1..140: note = Description of Artificial Sequence: Syntheticpolypeptide
EVQLVESGGALVKPGGSLRLSCAASGFTFSKAWMSWVRQAPGKGLEWVGRIKSVTDGETTDYAAPVKGRFTISRDDSKSTLYLQMNSLKTEDTAVYYCTSSFCCRGGSCPSHETSYCGGQYKSYYYMDVWGKGTTVTVSS

SEQ ID NO: 1387 - protein, 140 aa, synthetic construct
  REGION 1..140: note = Description of Artificial Sequence: Syntheticpolypeptide
EVQLVESGGALVKPGGSLRLSCAASGFTFSKAWMSWVRQAPGKGLEWVGRIKSVTDGETTDYAAPVKGRFTISRDDSKSTLYLQMNSLKTEDTAVYYCTSSFCCRGGSCPSHDQSYCGGQYKSYYYMDVWGKGTTVTVSS

SEQ ID NO: 1388 - protein, 140 aa, synthetic construct
  REGION 1..140: note = Description of Artificial Sequence: Syntheticpolypeptide
EVQLVESGGALVKPGGSLRLSCAASGFTFSKAWMSWVRQAPGKGLEWVGRIKSVTDGETTDYAAPVKGRFTISRDDSKSTLYLQMNSLKTEDTAVYYCTSSFCCRGGSCPSHDTSMCGGQYKSYYYMDVWGKGTTVTVSS

SEQ ID NO: 1389 - protein, 140 aa, synthetic construct
  REGION 1..140: note = Description of Artificial Sequence: Syntheticpolypeptide
EVQLVESGGALVKPGGSLRLSCAASGFTFSKAWMSWVRQAPGKGLEWVGRIKSVTDGETTDYAAPVKGRFTISRDDSKSTLYLQMNSLKTEDTAVYYCTSSFCCRGGSCPSHDTSYCAGQYKSYYYMDVWGKGTTVTVSS

SEQ ID NO: 1390 - protein, 140 aa, synthetic construct
  REGION 1..140: note = Description of Artificial Sequence: Syntheticpolypeptide
EVQLVESGGALVKPGGSLRLSCAASGFTFSKAWMSWVRQAPGKGLEWVGRIKSVTDGETTDYAAPVKGRFTISRDDSKSTLYLQMNSLKTEDTAVYYCTSSFCCRGGSCPSHDTSYCNGQYKSYYYMDVWGKGTTVTVSS

SEQ ID NO: 1391 - protein, 140 aa, synthetic construct
  REGION 1..140: note = Description of Artificial Sequence: Syntheticpolypeptide
EVQLVESGGALVKPGGSLRLSCAASGFTFSKAWMSWVRQAPGKGLEWVGRIKSVTDGETTDYAAPVKGRFTISRDDSKSTLYLQMNSLKTEDTAVYYCTSSFCCRGGSCPSHDTSYCGNQYKSYYYMDVWGKGTTVTVSS

SEQ ID NO: 1392 - protein, 140 aa, synthetic construct
  REGION 1..140: note = Description of Artificial Sequence: Syntheticpolypeptide
EVQLVESGGALVKPGGSLRLSCAASGFTFSKAWMSWVRQAPGKGLEWVGRIKSVTDGETTDYAAPVKGRFTISRDDSKSTLYLQMNSLKTEDTAVYYCTSSFCCRGGSCPSHDTSYCGAQYKSYYYMDVWGKGTTVTVSS

SEQ ID NO: 1393 - protein, 140 aa, synthetic construct
  REGION 1..140: note = Description of Artificial Sequence: Syntheticpolypeptide
EVQLVESGGALVKPGGSLRLSCAASGFTFSKAWMSWVRQAPGKGLEWVGRIKSVTDGETTDYAAPVKGRFTISRDDSKSTLYLQMNSLKTEDTAVYYCTSSFCCRGGSCPSHDTSYCGGSYKSYYYMDVWGKGTTVTVSS

SEQ ID NO: 1394 - protein, 140 aa, synthetic construct
  REGION 1..140: note = Description of Artificial Sequence: Syntheticpolypeptide
EVQLVESGGALVKPGGSLRLSCAASGFTFSKAWMSWVRQAPGKGLEWVGRIKSVTDGETTDYAAPVKGRFTISRDDSKSTLYLQMNSLKTEDTAVYYCTSSFCCRGGSCPSHDTSYCGGYYKSYYYMDVWGKGTTVTVSS

SEQ ID NO: 1395 - protein, 140 aa, synthetic construct
  REGION 1..140: note = Description of Artificial Sequence: Syntheticpolypeptide
EVQLVESGGALVKPGGSLRLSCAASGFTFSKAWMSWVRQAPGKGLEWVGRIKSVTDGETTDYAAPVKGRFTISRDDSKSTLYLQMNSLKTEDTAVYYCTSSFCCRGGSCPSHDTSYCGGQFKSYYYMDVWGKGTTVTVSS

SEQ ID NO: 1396 - protein, 140 aa, synthetic construct
  REGION 1..140: note = Description of Artificial Sequence: Syntheticpolypeptide
EVQLVESGGALVKPGGSLRLSCAASGFTFSKAWMSWVRQAPGKGLEWVGRIKSVTDGETTDYAAPVKGRFTISRDDSKSTLYLQMNSLKTEDTAVYYCTSSFCCRGGSCPSHDTSYCGGQYPSYYYMDVWGKGTTVTVSS

SEQ ID NO: 1397 - protein, 140 aa, synthetic construct
  REGION 1..140: note = Description of Artificial Sequence: Syntheticpolypeptide
EVQLVESGGALVKPGGSLRLSCAASGFTFSKAWMSWVRQAPGKGLEWVGRIKSVTDGETTDYAAPVKGRFTISRDDSKSTLYLQMNSLKTEDTAVYYCTSSFCCRGGSCPSHDTSYCGGQYASYYYMDVWGKGTTVTVSS

SEQ ID NO: 1398 - protein, 140 aa, synthetic construct
  REGION 1..140: note = Description of Artificial Sequence: Syntheticpolypeptide
EVQLVESGGALVKPGGSLRLSCAASGFTFSKAWMSWVRQAPGKGLEWVGRIKSVTDGETTDYAAPVKGRFTISRDDSKSTLYLQMNSLKTEDTAVYYCTSSFCCRGGSCPSHDTSYCGGQYQSYYYMDVWGKGTTVTVSS

SEQ ID NO: 1399 - protein, 140 aa, synthetic construct
  REGION 1..140: note = Description of Artificial Sequence: Syntheticpolypeptide
EVQLVESGGALVKPGGSLRLSCAASGFTFSKAWMSWVRQAPGKGLEWVGRIKSVTDGETTDYAAPVKGRFTISRDDSKSTLYLQMNSLKTEDTAVYYCTSSFCCRGGSCPSHDTSYCGGQYKDYYYMDVWGKGTTVTVSS

SEQ ID NO: 1400 - protein, 140 aa, synthetic construct
  REGION 1..140: note = Description of Artificial Sequence: Syntheticpolypeptide
EVQLVESGGALVKPGGSLRLSCAASGFTFSKAWMSWVRQAPGKGLEWVGRIKSVTDGETTDYAAPVKGRFTISRDDSKSTLYLQMNSLKTEDTAVYYCTSSFCCRGGSCPSHDTSYCGGQYKSFYYMDVWGKGTTVTVSS

SEQ ID NO: 1401 - protein, 140 aa, synthetic construct
  REGION 1..140: note = Description of Artificial Sequence: Syntheticpolypeptide
EVQLVESGGALVKPGGSLRLSCAASGFTFSKAWMSWVRQAPGKGLEWVGRIKSVTDGETTDYAAPVKGRFTISRDDSKSTLYLQMNSLKTEDTAVYYCTSSFCCRGGSCPSHDTSYCGGQYKSYFYMDVWGKGTTVTVSS

SEQ ID NO: 1402 - protein, 140 aa, synthetic construct
  REGION 1..140: note = Description of Artificial Sequence: Syntheticpolypeptide
EVQLVESGGALVKPGGSLRLSCAASGFTFSKAWMSWVRQAPGKGLEWVGRIKSVTDGETTDYAAPVKGRFTISRDDSKSTLYLQMNSLKTEDTAVYYCTSSFCCRGGSCPSHDTSYCGGQYKSYYWMDVWGKGTTVTVSS

SEQ ID NO: 1403 - protein, 140 aa, synthetic construct
  REGION 1..140: note = Description of Artificial Sequence: Syntheticpolypeptide
EVQLVESGGALVKPGGSLRLSCAASGFTFSKAWMSWVRQAPGKGLEWVGRIKSVTDGETTDYAAPVKGRFTISRDDSKSTLYLQMNSLKTEDTAVYYCTSSFCCRGGSCPSHDTSYCGGQYKSYYLMDVWGKGTTVTVSS

SEQ ID NO: 1404 - protein, 140 aa, synthetic construct
  REGION 1..140: note = Description of Artificial Sequence: Syntheticpolypeptide
EVQLVESGGALVKPGGSLRLSCAASGFTFSKAWMSWVRQAPGKGLEWVGRIKSVTDGETTDYAAPVKGRFTISRDDSKSTLYLQMNSLKTEDTAVYYCTSSFCCRGGSCPSHDTSYCGGQYKSYYYVDVWGKGTTVTVSS

SEQ ID NO: 1405 - protein, 140 aa, synthetic construct
  REGION 1..140: note = Description of Artificial Sequence: Syntheticpolypeptide
EVQLVESGGALVKPGGSLRLSCAASGFTFSKAWMSWVRQAPGKGLEWVGRIKSVTDGETTDYAAPVKGRFTISRDDSKSTLYLQMNSLKTEDTAVYYCTSSFCCRGGSCPSHDTSYCGGQYKSYYYFDVWGKGTTVTVSS

SEQ ID NO: 1406 - protein, 140 aa, synthetic construct
  REGION 1..140: note = Description of Artificial Sequence: Syntheticpolypeptide
EVQLVESGGALVKPGGSLRLSCAASGFTFSKAWMSWVRQAPGKGLEWVGRIKSVTDGETTDYAAPVKGRFTISRDDSKSTLYLQMNSLKTEDTAVYYCTSSFCCRGGSCPSHDTSYCGGQYKSYYYMNVWGKGTTVTVSS

SEQ ID NO: 1407 - protein, 140 aa, synthetic construct
  REGION 1..140: note = Description of Artificial Sequence: Syntheticpolypeptide
EVQLVESGGALVKPGGSLRLSCAASGFTFSKAWMSWVRQAPGKGLEWVGRIKSVTDGETTDYAAPVKGRFTISRDDSKSTLYLQMNSLKTEDTAVYYCTSSFCCRGGSCPSHDTSYCGGQYKSYYYMDIWGKGTTVTVSS

SEQ ID NO: 1408 - protein, 140 aa, synthetic construct
  REGION 1..140: note = Description of Artificial Sequence: Syntheticpolypeptide
EVQLVESGGALVKPGGSLRLSCAASGFTFSKAWMSWVRQAPGKGLEWVGRIKSVTDGETTDYAAPVKGRFTISRDDSKSTLYLQMNSLKTEDTAVYYCTSSFCCRGGSCPSHDTSYCGGQYKSYYYMDPWGKGTTVTVSS

SEQ ID NO: 1409 - protein, 140 aa, synthetic construct
  REGION 1..140: note = Description of Artificial Sequence: Syntheticpolypeptide
EVQLVESGGALVKPGGSLRLSCAASGFTFSKAWMSWVRQAPGKGLEWVGRIKSVTDGETTDYAAPVKGRFTISRDDSKSTLYLQMNSLKTEDTAVYYCTSSFCCRGGSCPSHDTSYCGGQFKDYYYMDVWGKGTTVTVSS

SEQ ID NO: 1410 - protein, 140 aa, synthetic construct
  REGION 1..140: note = Description of Artificial Sequence: Syntheticpolypeptide
EVQLVESGGALVKPGGSLRLSCAASGFTFSKAWMSWVRQAPGKGLEWVGRIKSVTDGETTDYAAPVKGRFTISRDDSKSTLYLQMNSLKTEDTAVYYCTSSFCCRGGSCPSHDTSYCGGQSKQYYYMDVWGKGTTVTVSS

SEQ ID NO: 1411 - protein, 140 aa, synthetic construct
  REGION 1..140: note = Description of Artificial Sequence: Syntheticpolypeptide
EVQLVESGGALVKPGGSLRLSCAASGFTFSKAWMSWVRQAPGKGLEWVGRIKSVTDGETTDYAAPVKGRFTISRDDSKSTLYLQMNSLKTEDTAVYYCTSSFCCRGGSCPSHDTSYCGGQSKKYYYMDVWGKGTTVTVSS

SEQ ID NO: 1412 - protein, 140 aa, synthetic construct
  REGION 1..140: note = Description of Artificial Sequence: Syntheticpolypeptide
EVQLVESGGALVKPGGSLRLSCAASGFTFSKAWMSWVRQAPGKGLEWVGRIKSVTDGETTDYAAPVKGRFTISRDDSKSTLYLQMNSLKTEDTAVYYCTSSFSCRGGSCPSHDTSYSGGQYKSYYYMDVWGKGTTVTVSS

SEQ ID NO: 1413 - protein, 140 aa, synthetic construct
  REGION 1..140: note = Description of Artificial Sequence: Syntheticpolypeptide
EVQLVESGGALVKPGGSLRLSCAASGFTFSKAWMSWVRQAPGKGLEWVGRIKSVTDGETTDYAAPVKGRFTISRDDSKSTLYLQMNSLKTEDTAVYYCTSSFACRGGSCPSHDTSYVGGQYKSYYYMDVWGKGTTVTVSS

SEQ ID NO: 1414 - protein, 140 aa, synthetic construct
  REGION 1..140: note = Description of Artificial Sequence: Syntheticpolypeptide
EVQLVESGGALVKPGGSLRLSCAASGFTFSKAWMSWVRQAPGKGLEWVGRIKSVTDGETTDYAAPVKGRFTISRDDSKSTLYLQMNSLKTEDTAVYYCTSSFCCRGNSCPAHDTSYCGGQYPSYYYMDVWGKGTTVTVSS

SEQ ID NO: 1415 - protein, 140 aa, synthetic construct
  REGION 1..140: note = Description of Artificial Sequence: Syntheticpolypeptide
EVQLVESGGALVKPGGSLRLSCAASGFTFSKAWMSWVRQAPGKGLEWVGRIKSVTDGETTDYAAPVKGRFTISRDDSKSTLYLQMNSLKTEDTAVYYCTSSYCCLGGSCPSHDTSYCGGSYKSYYYMDVWGKGTTVTVSS

SEQ ID NO: 1416 - protein, 140 aa, synthetic construct
  REGION 1..140: note = Description of Artificial Sequence: Syntheticpolypeptide
EVQLVESGGALVKPGGSLRLSCAASGFTFSKAWMSWVRQAPGKGLEWVGRIKSVTDGETTDYAAPVKGRFTISRDDSKSTLYLQMNSLKTEDTAVYYCTSSFCCRGKSCPSHDNSYCGGQYASYYYMDVWGKGTTVTVSS

SEQ ID NO: 1417 - protein, 140 aa, synthetic construct
  REGION 1..140: note = Description of Artificial Sequence: Syntheticpolypeptide
EVQLVESGGALVKPGGSLRLSCAASGFTFSKAWMSWVRQAPGKGLEWVGRIKSVTDGETTDYAAPVKGRFTISRDDSKSTLYLQMNSLKTEDTAVYYCTSSYCCRGGSCPSHDTSYCGGQFKSYYYMDPWGKGTTVTVSS

SEQ ID NO: 1418 - protein, 140 aa, synthetic construct
  REGION 1..140: note = Description of Artificial Sequence: Syntheticpolypeptide
EVQLVESGGALVKPGGSLRLSCAASGFTFSKAWMSWVRQAPGKGLEWVGRIKSVTDGETTDYAAPVKGRFTISRDDSKSTLYLQMNSLKTEDTAVYYCTSTFCCRGGSCLSHDTSYCGGQYKSYYWMDVWGKGTTVTVSS

SEQ ID NO: 1419 - protein, 140 aa, synthetic construct
  REGION 1..140: note = Description of Artificial Sequence: Syntheticpolypeptide
EVQLVESGGALVKPGGSLRLSCAASGFDFSKAWMSWVRQAPGKGLEWVGRIKSVTDGQTTDYAAPVKGRFTISRDDSKSTLYLQMNSLKTEDTAVYYCTSSFCCRGGSCPSHDTSYCGGQYKSYYYMDVWGKGTTVTVSS

SEQ ID NO: 1420 - protein, 140 aa, synthetic construct; identical to SEQ ID NO: 1341
  REGION 1..140: note = Description of Artificial Sequence: Syntheticpolypeptide

SEQ ID NO: 1421 - protein, 140 aa, synthetic construct
  REGION 1..140: note = Description of Artificial Sequence: Syntheticpolypeptide
EVQLVESGGALVKPGGSLRLSCAASGFDASKAWFTWVRQAPGKGLEWVGRIKSVTDGETTDYAAPVKGRFTISRDDSKSTLYLQMNSLKTEDTAVYYCTSSFCCRGGSCPSHDTSYCGGQYKSYYYMDVWGKGTTVTVSS

SEQ ID NO: 1422 - protein, 140 aa, synthetic construct; identical to SEQ ID NO: 94
  REGION 1..140: note = Description of Artificial Sequence: Syntheticpolypeptide

SEQ ID NO: 1423 - protein, 140 aa, synthetic construct; identical to SEQ ID NO: 94
  REGION 1..140: note = Description of Artificial Sequence: Syntheticpolypeptide

SEQ ID NO: 1424 - protein, 140 aa, synthetic construct; identical to SEQ ID NO: 94
  REGION 1..140: note = Description of Artificial Sequence: Syntheticpolypeptide

SEQ ID NO: 1425 - protein, 140 aa, synthetic construct; identical to SEQ ID NO: 94
  REGION 1..140: note = Description of Artificial Sequence: Syntheticpolypeptide

SEQ ID NO: 1426 - protein, 140 aa, synthetic construct; identical to SEQ ID NO: 94
  REGION 1..140: note = Description of Artificial Sequence: Syntheticpolypeptide

SEQ ID NO: 1427 - protein, 140 aa, synthetic construct; identical to SEQ ID NO: 94
  REGION 1..140: note = Description of Artificial Sequence: Syntheticpolypeptide

SEQ ID NO: 1428 - protein, 140 aa, synthetic construct; identical to SEQ ID NO: 94
  REGION 1..140: note = Description of Artificial Sequence: Syntheticpolypeptide

SEQ ID NO: 1429 - protein, 140 aa, synthetic construct; identical to SEQ ID NO: 94
  REGION 1..140: note = Description of Artificial Sequence: Syntheticpolypeptide

SEQ ID NO: 1430 - protein, 140 aa, synthetic construct; identical to SEQ ID NO: 94
  REGION 1..140: note = Description of Artificial Sequence: Syntheticpolypeptide

SEQ ID NO: 1431 - protein, 140 aa, synthetic construct; identical to SEQ ID NO: 94
  REGION 1..140: note = Description of Artificial Sequence: Syntheticpolypeptide

SEQ ID NO: 1432 - protein, 140 aa, synthetic construct; identical to SEQ ID NO: 94
  REGION 1..140: note = Description of Artificial Sequence: Syntheticpolypeptide

SEQ ID NO: 1433 - protein, 140 aa, synthetic construct; identical to SEQ ID NO: 94
  REGION 1..140: note = Description of Artificial Sequence: Syntheticpolypeptide

SEQ ID NO: 1434 - protein, 140 aa, synthetic construct; identical to SEQ ID NO: 94
  REGION 1..140: note = Description of Artificial Sequence: Syntheticpolypeptide

SEQ ID NO: 1435 - protein, 140 aa, synthetic construct; identical to SEQ ID NO: 94
  REGION 1..140: note = Description of Artificial Sequence: Syntheticpolypeptide

SEQ ID NO: 1436 - protein, 140 aa, synthetic construct; identical to SEQ ID NO: 94
  REGION 1..140: note = Description of Artificial Sequence: Syntheticpolypeptide

SEQ ID NO: 1437 - protein, 140 aa, synthetic construct; identical to SEQ ID NO: 94
  REGION 1..140: note = Description of Artificial Sequence: Syntheticpolypeptide

SEQ ID NO: 1438 - protein, 140 aa, synthetic construct; identical to SEQ ID NO: 94
  REGION 1..140: note = Description of Artificial Sequence: Syntheticpolypeptide

SEQ ID NO: 1439 - protein, 140 aa, synthetic construct; identical to SEQ ID NO: 94
  REGION 1..140: note = Description of Artificial Sequence: Syntheticpolypeptide

SEQ ID NO: 1440 - protein, 140 aa, synthetic construct; identical to SEQ ID NO: 94
  REGION 1..140: note = Description of Artificial Sequence: Syntheticpolypeptide

SEQ ID NO: 1441 - protein, 140 aa, synthetic construct; identical to SEQ ID NO: 94
  REGION 1..140: note = Description of Artificial Sequence: Syntheticpolypeptide

SEQ ID NO: 1442 - protein, 140 aa, synthetic construct; identical to SEQ ID NO: 94
  REGION 1..140: note = Description of Artificial Sequence: Syntheticpolypeptide

SEQ ID NO: 1443 - protein, 140 aa, synthetic construct; identical to SEQ ID NO: 94
  REGION 1..140: note = Description of Artificial Sequence: Syntheticpolypeptide

SEQ ID NO: 1444 - protein, 140 aa, synthetic construct; identical to SEQ ID NO: 94
  REGION 1..140: note = Description of Artificial Sequence: Syntheticpolypeptide

SEQ ID NO: 1445 - protein, 140 aa, synthetic construct; identical to SEQ ID NO: 94
  REGION 1..140: note = Description of Artificial Sequence: Syntheticpolypeptide

SEQ ID NO: 1446 - protein, 140 aa, synthetic construct; identical to SEQ ID NO: 94
  REGION 1..140: note = Description of Artificial Sequence: Syntheticpolypeptide

SEQ ID NO: 1447 - protein, 140 aa, synthetic construct; identical to SEQ ID NO: 94
  REGION 1..140: note = Description of Artificial Sequence: Syntheticpolypeptide

SEQ ID NO: 1448 - protein, 140 aa, synthetic construct; identical to SEQ ID NO: 94
  REGION 1..140: note = Description of Artificial Sequence: Syntheticpolypeptide

SEQ ID NO: 1449 - protein, 140 aa, synthetic construct; identical to SEQ ID NO: 94
  REGION 1..140: note = Description of Artificial Sequence: Syntheticpolypeptide

SEQ ID NO: 1450 - protein, 140 aa, synthetic construct; identical to SEQ ID NO: 94
  REGION 1..140: note = Description of Artificial Sequence: Syntheticpolypeptide

SEQ ID NO: 1451 - protein, 140 aa, synthetic construct; identical to SEQ ID NO: 94
  REGION 1..140: note = Description of Artificial Sequence: Syntheticpolypeptide

SEQ ID NO: 1452 - protein, 140 aa, synthetic construct; identical to SEQ ID NO: 94
  REGION 1..140: note = Description of Artificial Sequence: Syntheticpolypeptide

SEQ ID NO: 1453 - protein, 140 aa, synthetic construct; identical to SEQ ID NO: 94
  REGION 1..140: note = Description of Artificial Sequence: Syntheticpolypeptide

SEQ ID NO: 1454 - protein, 140 aa, synthetic construct; identical to SEQ ID NO: 94
  REGION 1..140: note = Description of Artificial Sequence: Syntheticpolypeptide

SEQ ID NO: 1455 - protein, 140 aa, synthetic construct; identical to SEQ ID NO: 94
  REGION 1..140: note = Description of Artificial Sequence: Syntheticpolypeptide

SEQ ID NO: 1456 - protein, 140 aa, synthetic construct; identical to SEQ ID NO: 94
  REGION 1..140: note = Description of Artificial Sequence: Syntheticpolypeptide

SEQ ID NO: 1457 - protein, 140 aa, synthetic construct; identical to SEQ ID NO: 94
  REGION 1..140: note = Description of Artificial Sequence: Syntheticpolypeptide

SEQ ID NO: 1458 - protein, 140 aa, synthetic construct; identical to SEQ ID NO: 94
  REGION 1..140: note = Description of Artificial Sequence: Syntheticpolypeptide

SEQ ID NO: 1459 - protein, 140 aa, synthetic construct; identical to SEQ ID NO: 94
  REGION 1..140: note = Description of Artificial Sequence: Syntheticpolypeptide

SEQ ID NO: 1460 - protein, 140 aa, synthetic construct; identical to SEQ ID NO: 94
  REGION 1..140: note = Description of Artificial Sequence: Syntheticpolypeptide

SEQ ID NO: 1461 - protein, 140 aa, synthetic construct; identical to SEQ ID NO: 94
  REGION 1..140: note = Description of Artificial Sequence: Syntheticpolypeptide

SEQ ID NO: 1462 - protein, 140 aa, synthetic construct; identical to SEQ ID NO: 94
  REGION 1..140: note = Description of Artificial Sequence: Syntheticpolypeptide

SEQ ID NO: 1463 - protein, 140 aa, synthetic construct; identical to SEQ ID NO: 94
  REGION 1..140: note = Description of Artificial Sequence: Syntheticpolypeptide

SEQ ID NO: 1464 - protein, 140 aa, synthetic construct; identical to SEQ ID NO: 94
  REGION 1..140: note = Description of Artificial Sequence: Syntheticpolypeptide

SEQ ID NO: 1465 - protein, 140 aa, synthetic construct; identical to SEQ ID NO: 94
  REGION 1..140: note = Description of Artificial Sequence: Syntheticpolypeptide

SEQ ID NO: 1466 - protein, 140 aa, synthetic construct; identical to SEQ ID NO: 94
  REGION 1..140: note = Description of Artificial Sequence: Syntheticpolypeptide

SEQ ID NO: 1467 - protein, 140 aa, synthetic construct; identical to SEQ ID NO: 94
  REGION 1..140: note = Description of Artificial Sequence: Syntheticpolypeptide

SEQ ID NO: 1468 - protein, 140 aa, synthetic construct; identical to SEQ ID NO: 94
  REGION 1..140: note = Description of Artificial Sequence: Syntheticpolypeptide

SEQ ID NO: 1469 - protein, 140 aa, synthetic construct; identical to SEQ ID NO: 94
  REGION 1..140: note = Description of Artificial Sequence: Syntheticpolypeptide

SEQ ID NO: 1470 - protein, 140 aa, synthetic construct; identical to SEQ ID NO: 94
  REGION 1..140: note = Description of Artificial Sequence: Syntheticpolypeptide

SEQ ID NO: 1471 - protein, 140 aa, synthetic construct; identical to SEQ ID NO: 94
  REGION 1..140: note = Description of Artificial Sequence: Syntheticpolypeptide

SEQ ID NO: 1472 - protein, 140 aa, synthetic construct; identical to SEQ ID NO: 94
  REGION 1..140: note = Description of Artificial Sequence: Syntheticpolypeptide

SEQ ID NO: 1473 - protein, 140 aa, synthetic construct
  REGION 1..140: note = Description of Artificial Sequence: Syntheticpolypeptide
EVQLVESGGALVKPGGSLRLSCAASGFTFSKAWYSWVRQAPGKGLEWVGRIKSVTDGETTDYAAPVKGRFTISRDDSKSTLYLQMNSLKTEDTAVYYCTSSFCCRGGSCPSHDTSYCGGQYKSYYYMDVWGKGTTVTVSS

SEQ ID NO: 1474 - protein, 140 aa, synthetic construct; identical to SEQ ID NO: 78
  REGION 1..140: note = Description of Artificial Sequence: Syntheticpolypeptide

SEQ ID NO: 1475 - protein, 140 aa, synthetic construct; identical to SEQ ID NO: 78
  REGION 1..140: note = Description of Artificial Sequence: Syntheticpolypeptide

SEQ ID NO: 1476 - protein, 140 aa, synthetic construct
  REGION 1..140: note = Description of Artificial Sequence: Syntheticpolypeptide
EVQLVESGGGLVQPGPSLRLSCTASGFTFSKAWMSWVRQAPGKGLEWVGFIKSVTDGETTEYAASVKGRFTISRDDSKSIAYLQMNSLKTEDTAVYYCTSSFCCRGGSCPSHDTSYCGGQYKSYYYMDVWGKGTTVTVSS

SEQ ID NO: 1477 - protein, 140 aa, synthetic construct
  REGION 1..140: note = Description of Artificial Sequence: Syntheticpolypeptide
EVQLVESGGALVKPGGSLRLSCAASGFTFSKAWMSWVRQAPGKGLEWVGRIKSVTDGETTDYAAPVKGRFTISRDDSKSTLYLQMNSLKTEDTAVYYCTSSYCCRSGSCPSSDTSYCNGQFKSYYYMDPWGKGTTVTVSS

SEQ ID NO: 1478 - protein, 140 aa, synthetic construct
  REGION 1..140: note = Description of Artificial Sequence: Syntheticpolypeptide
EVQLVESGGALVKPGGSLRLSCAASGFTFSKAWMSWVRQAPGKGLEWVGRIKSVTDGETTDYAAPVKGRFTISRDDSKSTLYLQMNSLKTEDTAVYYCTSSFCCRSGSCPSSDTSYCNGQYKSYYYVNIWGKGTTVTVSS

SEQ ID NO: 1479 - protein, 140 aa, synthetic construct
  REGION 1..140: note = Description of Artificial Sequence: Syntheticpolypeptide
EVQLVESGGALVKPGGSLRLSCAASGFTFSKAWMSWVRQAPGKGLEWVGRIKSVTDGETTDYAAPVKGRFTISRDDSKSTLYLQMNSLKTEDTAVYYCTTSFCCRGASCPSHDTSYCAGSYKSYYYVNIWGKGTTVTVSS

SEQ ID NO: 1480 - protein, 140 aa, synthetic construct
  REGION 1..140: note = Description of Artificial Sequence: Syntheticpolypeptide
EVQLVESGGALVKPGGSLRLSCAASGFTFSKAWMSWVRQAPGKGLEWVGRIKSVTDGETTDYAAPVKGRFTISRDDSKSTLYLQMNSLKTEDTAVYYCTSAFCCRGKSCPSSDTSYCGGQYPSYYYVNIWGKGTTVTVSS

SEQ ID NO: 1481 - protein, 140 aa, synthetic construct
  REGION 1..140: note = Description of Artificial Sequence: Syntheticpolypeptide
EVQLVESGGALVKPGGSLRLSCAASGFTFSKAWMSWVRQAPGKGLEWVGRIKSVTDGETTDYAAPVKGRFTISRDDSKSTLYLQMNSLKTEDTAVYYCTSAFCCRGKSCPSHDTSFCGGQDKRYYYVNIWGKGTTVTVSS

SEQ ID NO: 1482 - protein, 140 aa, synthetic construct
  REGION 1..140: note = Description of Artificial Sequence: Syntheticpolypeptide
EVQLVESGGALVKPGGSLRLSCAASGFTFSKAWMSWVRQAPGKGLEWVGRIKSVTDGETTDYAAPVKGRFTISRDDSKSTLYLQMNSLKTEDTAVYYCTSAFCCRGGNCPSHETSYCNGQNKQYYYMDVWGKGTTVTVSS

SEQ ID NO: 1483 - protein, 140 aa, synthetic construct
  REGION 1..140: note = Description of Artificial Sequence: Syntheticpolypeptide
EVQLVESGGALVKPGGSLRLSCAASGFTFSKAWMSWVRQAPGKGLEWVGRIKSVTDGETTDYAAPVKGRFTISRDDSKSTLYLQMNSLKTEDTAVYYCTSSFCCRGNQCPSSDTSFCGGQDKRYYYMDPWGKGTTVTVSS

SEQ ID NO: 1484 - protein, 140 aa, synthetic construct
  REGION 1..140: note = Description of Artificial Sequence: Syntheticpolypeptide
EVQLVESGGALVKPGGSLRLSCAASGFTFSKAWMSWVRQAPGKGLEWVGRIKSVTDGETTDYAAPVKGRFTISRDDSKSTLYLQMNSLKTEDTAVYYCTTSFCCRGNQCPSHETSYCGGYYKSYFYMDVWGKGTTVTVSS

SEQ ID NO: 1485 - protein, 140 aa, synthetic construct
  REGION 1..140: note = Description of Artificial Sequence: Syntheticpolypeptide
EVQLVESGGALVKPGGSLRLSCAASGFTFSKAWMSWVRQAPGKGLEWVGRIKSVTDGETTDYAAPVKGRFTISRDDSKSTLYLQMNSLKTEDTAVYYCTSSYCCRGKQCPSHDTSYCAGQYADYYYMDVWGKGTTVTVSS

SEQ ID NO: 1486 - protein, 140 aa, synthetic construct
  REGION 1..140: note = Description of Artificial Sequence: Syntheticpolypeptide
EVQLVESGGALVKPGGSLRLSCAASGFTFSKAWMSWVRQAPGKGLEWVGRIKSVTDGETTDYAAPVKGRFTISRDDSKSTLYLQMNSLKTEDTAVYYCISSFCCRGKQCPSSDTSYCNGQYADYYYMDVWGKGTTVTVSS

SEQ ID NO: 1487 - protein, 140 aa, synthetic construct
  REGION 1..140: note = Description of Artificial Sequence: Syntheticpolypeptide
EVQLVESGGALVKPGGSLRLSCAASGFTFSKAWMSWVRQAPGKGLEWVGRIKSVTDGETTDYAAPVKGRFTISRDDSKSTLYLQMNSLKTEDTAVYYCTSSFCCRGKQCPSSDTSYCNGQYADYYYVNIWGKGTTVTVSS

SEQ ID NO: 1488 - protein, 140 aa, synthetic construct
  REGION 1..140: note = Description of Artificial Sequence: Syntheticpolypeptide
EVQLVESGGALVKPGGSLRLSCAASGFTFSKAWMSWVRQAPGKGLEWVGRIKSVTDGETTDYAAPVKGRFTISRDDSKSTLYLQMNSLKTEDTAVYYCISSFCCRGKQCPSSDTSFCGGQDKRYYFMDVWGKGTTVTVSS

SEQ ID NO: 1489 - protein, 140 aa, synthetic construct
  REGION 1..140: note = Description of Artificial Sequence: Syntheticpolypeptide
EVQLVESGGALVKPGGSLRLSCAASGFTFSKAWMSWVRQAPGKGLEWVGRIKSVTDGETTDYAAPVKGRFTISRDDSKSTLYLQMNSLKTEDTAVYYCTSAFCCRGKQCPSSDTSYCGGQYASFYYMDVWGKGTTVTVSS

SEQ ID NO: 1490 - protein, 140 aa, synthetic construct
  REGION 1..140: note = Description of Artificial Sequence: Syntheticpolypeptide
EVQLVESGGALVKPGGSLRLSCAASGFTFSKAWMSWVRQAPGKGLEWVGRIKSVTDGETTDYAAPVKGRFTISRDDSKSTLYLQMNSLKTEDTAVYYCTSSFCCQGNNCPSSDTSYCGGYYKDYYYMDVWGKGTTVTVSS

SEQ ID NO: 1491 - protein, 140 aa, synthetic construct
  REGION 1..140: note = Description of Artificial Sequence: Syntheticpolypeptide
EVQLVESGGALVKPGGSLRLSCAASGFTFSKAWMSWVRQAPGKGLEWVGRIKSVTDGETTDYAAPVKGRFTISRDDSKSTLYLQMNSLKTEDTAVYYCTSSFCCQGNNCPSHDTSYCGGQYKSYYYVNIWGKGTTVTVSS

SEQ ID NO: 1492 - protein, 140 aa, synthetic construct
  REGION 1..140: note = Description of Artificial Sequence: Syntheticpolypeptide
EVQLVESGGALVKPGGSLRLSCAASGFTFSKAWMSWVRQAPGKGLEWVGRIKSVTDGETTDYAAPVKGRFTISRDDSKSTLYLQMNSLKTEDTAVYYCTSSFCCQGKNCPSHETSYCGGQYADYYYMDVWGKGTTVTVSS

SEQ ID NO: 1493 - protein, 140 aa, synthetic construct
  REGION 1..140: note = Description of Artificial Sequence: Syntheticpolypeptide
EVQLVESGGALVKPGGSLRLSCAASGFTFSKAWMSWVRQAPGKGLEWVGRIKSVTDGETTDYAAPVKGRFTISRDDSKSTLYLQMNSLKTEDTAVYYCTTSFCCHGNSCPSSDTSYCGGQNKQYYYMDVWGKGTTVTVSS

SEQ ID NO: 1494 - protein, 140 aa, synthetic construct
  REGION 1..140: note = Description of Artificial Sequence: Syntheticpolypeptide
EVQLVESGGALVKPGGSLRLSCAASGFTFSKAWMSWVRQAPGKGLEWVGRIKSVTDGETTDYAAPVKGRFTISRDDSKSTLYLQMNSLKTEDTAVYYCISSFCCHGNSCPSHDTSYCNGQNKQYYYMDVWGKGTTVTVSS

SEQ ID NO: 1495 - protein, 140 aa, synthetic construct
  REGION 1..140: note = Description of Artificial Sequence: Syntheticpolypeptide
EVQLVESGGALVKPGGSLRLSCAASGFTFSKAWMSWVRQAPGKGLEWVGRIKSVTDGETTDYAAPVKGRFTISRDDSKSTLYLQMNSLKTEDTAVYYCISSFCCHSNNCPSSDTSYCNGQYKQYYYMDVWGKGTTVTVSS

SEQ ID NO: 1496 - protein, 140 aa, synthetic construct
  REGION 1..140: note = Description of Artificial Sequence: Syntheticpolypeptide
EVQLVESGGALVKPGGSLRLSCAASGFTFSKAWMSWVRQAPGKGLEWVGRIKSVTDGETTDYAAPVKGRFTISRDDSKSTLYLQMNSLKTEDTAVYYCTSSFCCHSNNCPSHDTSYCGGQYKSYYYVNIWGKGTTVTVSS

SEQ ID NO: 1497 - protein, 140 aa, synthetic construct
  REGION 1..140: note = Description of Artificial Sequence: Syntheticpolypeptide
EVQLVESGGALVKPGGSLRLSCAASGFTFSKAWMSWVRQAPGKGLEWVGRIKSVTDGETTDYAAPVKGRFTISRDDSKSTLYLQMNSLKTEDTAVYYCISSFACHSNNCPSSDTSYVNGYYKQYYFMDVWGKGTTVTVSS

SEQ ID NO: 1498 - protein, 140 aa, synthetic construct
  REGION 1..140: note = Description of Artificial Sequence: Syntheticpolypeptide
EVQLVESGGALVKPGGSLRLSCAASGFTFSKAWMSWVRQAPGKGLEWVGRIKSVTDGETTDYAAPVKGRFTISRDDSKSTLYLQMNSLKTEDTAVYYCTSSFCCHSNNCPSSDTSYCNGQYKQYYYVNIWGKGTTVTVSS

SEQ ID NO: 1499 - protein, 140 aa, synthetic construct
  REGION 1..140: note = Description of Artificial Sequence: Syntheticpolypeptide
EVQLVESGGALVKPGGSLRLSCAASGFTFSKAWMSWVRQAPGKGLEWVGRIKSVTDGETTDYAAPVKGRFTISRDDSKSTLYLQMNSLKTEDTAVYYCTSSFCCLGKACLSHDTSYCGGQYASYYYVNIWGKGTTVTVSS

SEQ ID NO: 1500 - protein, 140 aa, synthetic construct
  REGION 1..140: note = Description of Artificial Sequence: Syntheticpolypeptide
EVQLVESGGALVKPGGSLRLSCAASGFTFSKAWMSWVRQAPGKGLEWVGRIKSVTDGETTDYAAPVKGRFTISRDDSKSTLYLQMNSLKTEDTAVYYCTSSFCCLGKACLSSDTSYCGGYYASYYFVNIWGKGTTVTVSS

SEQ ID NO: 1501 - protein, 140 aa, synthetic construct
  REGION 1..140: note = Description of Artificial Sequence: Syntheticpolypeptide
EVQLVESGGALVKPGGSLRLSCAASGFTFSKAWMSWVRQAPGKGLEWVGRIKSVTDGETTDYAAPVKGRFTISRDDSKSTLYLQMNSLKTEDTAVYYCTSSFACLGKACLSSDTSYVGGYYASYYFVNIWGKGTTVTVSS

SEQ ID NO: 1502 - protein, 140 aa, synthetic construct
  REGION 1..140: note = Description of Artificial Sequence: Syntheticpolypeptide
EVQLVESGGALVKPGGSLRLSCAASGFTFSKAWMSWVRQAPGKGLEWVGRIKSVTDGETTDYAAPVKGRFTISRDDSKSTLYLQMNSLKTEDTAVYYCTSSYCCLGNSCPSSDTSYCGGQFKSYYYMDPWGKGTTVTVSS

SEQ ID NO: 1503 - protein, 140 aa, synthetic construct
  REGION 1..140: note = Description of Artificial Sequence: Syntheticpolypeptide
EVQLVESGGALVKPGGSLRLSCAASGFTFSKAWMSWVRQAPGKGLEWVGRIKSVTDGETTDYAAPVKGRFTISRDDSKSTLYLQMNSLKTEDTAVYYCTSSYCCLGNSCPSSDTSFCGGQDKRYYYMDPWGKGTTVTVSS

SEQ ID NO: 1504 - protein, 140 aa, synthetic construct
  REGION 1..140: note = Description of Artificial Sequence: Syntheticpolypeptide
EVQLVESGGALVKPGGSLRLSCAASGFTFSKAWMSWVRQAPGKGLEWVGRIKSVTDGETTDYAAPVKGRFTISRDDSKSTLYLQMNSLKTEDTAVYYCISSFCCLGGNCPSSETSYCGNQYPSYYYMDVWGKGTTVTVSS

SEQ ID NO: 1505 - protein, 140 aa, synthetic construct
  REGION 1..140: note = Description of Artificial Sequence: Syntheticpolypeptide
EVQLVESGGALVKPGGSLRLSCAASGFTFSKAWMSWVRQAPGKGLEWVGRIKSVTDGETTDYAAPVKGRFTISRDDSKSTLYLQMNSLKTEDTAVYYCISSFCCLGGNCPSSETSYCGNYYPSYFYMDVWGKGTTVTVSS

SEQ ID NO: 1506 - protein, 140 aa, synthetic construct
  REGION 1..140: note = Description of Artificial Sequence: Syntheticpolypeptide
EVQLVESGGALVKPGGSLRLSCAASGFTFSKAWMSWVRQAPGKGLEWVGRIKSVTDGETTDYAAPVKGRFTISRDDSKSTLYLQMNSLKTEDTAVYYCTSSFCCLGGNCPSSETSYCGNQYPSYYYVNIWGKGTTVTVSS

SEQ ID NO: 1507 - protein, 140 aa, synthetic construct
  REGION 1..140: note = Description of Artificial Sequence: Syntheticpolypeptide
EVQLVESGGALVKPGGSLRLSCAASGFTFSKAWMSWVRQAPGKGLEWVGRIKSVTDGETTDYAAPVKGRFTISRDDSKSTLYLQMNSLKTEDTAVYYCTTSFACRGNQCPSHETSYVGGYYKSYFYMDVWGKGTTVTVSS

SEQ ID NO: 1508 - protein, 140 aa, synthetic construct
  REGION 1..140: note = Description of Artificial Sequence: Syntheticpolypeptide
EVQLVESGGALVKPGGSLRLSCAASGFTFSKAWMSWVRQAPGKGLEWVGRIKSVTDGETTDYAAPVKGRFTISRDDSKSTLYLQMNSLKTEDTAVYYCTTSFACRGNQCPSSETSYVGGYYKSYFFMDVWGKGTTVTVSS

SEQ ID NO: 1509 - protein, 140 aa, synthetic construct
  REGION 1..140: note = Description of Artificial Sequence: Syntheticpolypeptide
EVQLVESGGALVKPGGSLRLSCAASGFTFSKAWMSWVRQAPGKGLEWVGRIKSVTDGETTDYAAPVKGRFTISRDDSKSTLYLQMNSLKTEDTAVYYCISSFACRGKQCPSSDTSYVGGQFKSYYFMDVWGKGTTVTVSS

SEQ ID NO: 1510 - protein, 140 aa, synthetic construct
  REGION 1..140: note = Description of Artificial Sequence: Syntheticpolypeptide
EVQLVESGGALVKPGGSLRLSCAASGFTFAKAWMSWVRQAPGKGLEWVGRIKAADDGKQTDYAAPVKGRFTISRDDSKSTLYLQMNSLKTEDTAVYYCTSSFCCRGGSCLSHDTSYCGGQYKSYYWMDVWGKGTTVTVSS

SEQ ID NO: 1511 - protein, 140 aa, synthetic construct
  REGION 1..140: note = Description of Artificial Sequence: Syntheticpolypeptide
EVQLVESGGALVKPGGSLRLSCAASGFTYAKAWMSWVRQAPGKGLEWVGRIKSVQDGEQTDYAAPVKGRFTISRDDSKSTLYLQMNSLKTEDTAVYYCTSSYCCLGGSCPSHDTSYCGGSYKSYYYMDVWGKGTTVTVSS

SEQ ID NO: 1512 - protein, 140 aa, synthetic construct
  REGION 1..140: note = Description of Artificial Sequence: Syntheticpolypeptide
EVQLVESGGALVKPGGSLRLSCAASGFDASKAWFTWVRQAPGKGLEWVGRIKSVTDGETTDYAAPVKGRFTISRDDSKSTLYLQMNSLKTEDTAVYYCTSSFCCRGGSCPSHDTSYCGGQNKQYYYMDVWGKGTTVTVSS

SEQ ID NO: 1513 - protein, 140 aa, synthetic construct
  REGION 1..140: note = Description of Artificial Sequence: Syntheticpolypeptide
EVQLVESGGALVKPGGSLRLSCAASGFDASKAWFTWVRQAPGKGLEWVGRIKSVTDGETTDYAAPVKGRFTISRDDSKSTLYLQMNSLKTEDTAVYYCTSSFACRGGSCPSHDTSYVGGQYKSYYYMDVWGKGTTVTVSS

SEQ ID NO: 1514 - protein, 140 aa, synthetic construct
  REGION 1..140: note = Description of Artificial Sequence: Syntheticpolypeptide
EVQLVESGGALVKPGGSLRLSCAASGFDASKAWFTWVRQAPGKGLEWVGRIKSVTDGETTDYAAPVKGRFTISRDDSKSTLYLQMNSLKTEDTAVYYCTSSYCCLGGSCPSHDTSYCGGSYKSYYYMDVWGKGTTVTVSS

SEQ ID NO: 1515 - protein, 140 aa, synthetic construct
  REGION 1..140: note = Description of Artificial Sequence: Syntheticpolypeptide
EVQLVESGGALVKPGGSLRLSCAASGFDASKAWFTWVRQAPGKGLEWVGRIKSVTDGETTDYAAPVKGRFTISRDDSKSTLYLQMNSLKTEDTAVYYCTSSFCCRGKSCPSHDTSYCGGQYASYYYMDVWGKGTTVTVSS

SEQ ID NO: 1516 - protein, 140 aa, synthetic construct
  REGION 1..140: note = Description of Artificial Sequence: Syntheticpolypeptide
EVQLVESGGALVKPGGSLRLSCAASGFTFSKAWMSWVRQAPGKGLEWVGRIKAADDGKQTDYAAPVKGRFTISRDDSKSTLYLQMNSLKTEDTAVYYCTSSFCCRGGNCPSHETSYCGNQYKSYYYMDVWGKGTTVTVSS

SEQ ID NO: 1517 - protein, 140 aa, synthetic construct
  REGION 1..140: note = Description of Artificial Sequence: Syntheticpolypeptide
EVQLVESGGALVKPGGSLRLSCAASGFTFSKAWMSWVRQAPGKGLEWVGRIKAADDGKQTDYAAPVKGRFTISRDDSKSTLYLQMNSLKTEDTAVYYCTSSFCCRSGSCPSSDTSYCNGQYKSYYYMDVWGKGTTVTVSS

SEQ ID NO: 1518 - protein, 140 aa, synthetic construct
  REGION 1..140: note = Description of Artificial Sequence: Syntheticpolypeptide
EVQLVESGGALVKPGGSLRLSCAASGFTFSKAWMSWVRQAPGKGLEWVGRIKAADDGKQTDYAAPVKGRFTISRDDSKSTLYLQMNSLKTEDTAVYYCTSSFCCRGGSCPSHDTSYCGGQYKSYYYVNIWGKGTTVTVSS

SEQ ID NO: 1519 - protein, 140 aa, synthetic construct
  REGION 1..140: note = Description of Artificial Sequence: Syntheticpolypeptide
EVQLVESGGALVKPGGSLRLSCAASGFTFSKAWMSWVRQAPGKGLEWVGRIKAADDGKQTDYAAPVKGRFTISRDDSKSTLYLQMNSLKTEDTAVYYCTTSFCCRGASCPSHDTSYCAGSYKSYYYMDVWGKGTTVTVSS

SEQ ID NO: 1520 - protein, 140 aa, synthetic construct
  REGION 1..140: note = Description of Artificial Sequence: Syntheticpolypeptide
EVQLVESGGALVKPGGSLRLSCAASGFTFSKAWMSWVRQAPGKGLEWVGRIKAADDGKQTDYAAPVKGRFTISRDDSKSTLYLQMNSLKTEDTAVYYCISSFCCRGNSCPSSDTSYCNGQYKSYYYMDVWGKGTTVTVSS

SEQ ID NO: 1521 - protein, 140 aa, synthetic construct
  REGION 1..140: note = Description of Artificial Sequence: Syntheticpolypeptide
EVQLVESGGALVKPGGSLRLSCAASGFTFSKAWMSWVRQAPGKGLEWVGRIKAVTDGHTTDYAAPVKGRFTISRDDSKSTLYLQMNSLKTEDTAVYYCTSSFCCRGGSCPSHDTSYCGGQYKSYYYMDVWGKGTTVTVSS

SEQ ID NO: 1522 - protein, 140 aa, synthetic construct
  REGION 1..140: note = Description of Artificial Sequence: Syntheticpolypeptide
EVQLVESGGALVKPGGSLRLSCAASGFVYSKAWMSWVRQAPGKGLEWVGRIKSVTDGQATDYAAPVKGRFTISRDDSKSTLYLQMNSLKTEDTAVYYCTSSFCCRGGSCPSHDTSYCGGQYKSYYYMDVWGKGTTVTVSS

SEQ ID NO: 1523 - protein, 140 aa, synthetic construct
  REGION 1..140: note = Description of Artificial Sequence: Syntheticpolypeptide
EVQLVESGGALVKPGGSLRLSCAASGFVFSKAWMSWVRQAPGKGLEWVGRIKSVTDGETTDYAAPVKGRFTISRDDSKSTLYLQMNSLKTEDTAVYYCTSSFCCRGKSCPSHDTSYCGGQYASYYYMDVWGKGTTVTVSS

SEQ ID NO: 1524 - protein, 140 aa, synthetic construct
  REGION 1..140: note = Description of Artificial Sequence: Syntheticpolypeptide
EVQLVESGGALVKPGGSLRLSCAASGFTFAKAWMSWVRQAPGKGLEWVGRIKSVTDAETTDYAAPVKGRFTISRDDSKSTLYLQMNSLKTEDTAVYYCTSSFCCRSGSCPSSDTSYCNGQYKSYYWMDVWGKGTTVTVSS

SEQ ID NO: 1525 - protein, 140 aa, synthetic construct
  REGION 1..140: note = Description of Artificial Sequence: Syntheticpolypeptide
EVQLVESGGALVKPGGSLRLSCAASGFTYAKAWFTWVRQAPGKGLEWVGRIKSTSDGGITDYAAPVKGRFTISRDDSKSTLYLQMNSLKTEDTAVYYCTSSFCCRGGSCPSHDTSFCGGQYKSYYYMDVWGKGTTVTVSS

SEQ ID NO: 1526 - protein, 140 aa, synthetic construct
  REGION 1..140: note = Description of Artificial Sequence: Syntheticpolypeptide
EVQLVESGGALVKPGGSLRLSCAASGFTFSKAWMSWVRQAPGKGLEWVGRIKSVSDGETTDYAAPVKGRFTISRDDSKSTLYLQMNSLKTEDTAVYYCTSSFCCRGGSCPSRDTSYCGGQYKSYYFMDVWGKGTTVTVSS

SEQ ID NO: 1527 - protein, 110 aa, synthetic construct
  REGION 1..110: note = Description of Artificial Sequence: Syntheticpolypeptide
QSVLTQAPSASETPGQRVIISCSGSSSNIGSSSVSWYQQLPGTAPKLLIYKNNQRPSGVPDRFSGSKSGTSASLAISGLRSEDEADYYCSTWDESLSVRVFGGGTKLTVL

SEQ ID NO: 1528 - protein, 110 aa, synthetic construct; identical to SEQ ID NO: 151
  REGION 1..110: note = Description of Artificial Sequence: Syntheticpolypeptide

SEQ ID NO: 1529 - protein, 110 aa, synthetic construct; identical to SEQ ID NO: 151
  REGION 1..110: note = Description of Artificial Sequence: Syntheticpolypeptide

SEQ ID NO: 1530 - protein, 110 aa, synthetic construct; identical to SEQ ID NO: 151
  REGION 1..110: note = Description of Artificial Sequence: Syntheticpolypeptide

SEQ ID NO: 1531 - protein, 110 aa, synthetic construct; identical to SEQ ID NO: 123
  REGION 1..110: note = Description of Artificial Sequence: Syntheticpolypeptide

SEQ ID NO: 1532 - protein, 110 aa, synthetic construct; identical to SEQ ID NO: 123
  REGION 1..110: note = Description of Artificial Sequence: Syntheticpolypeptide

SEQ ID NO: 1533 - protein, 110 aa, synthetic construct; identical to SEQ ID NO: 123
  REGION 1..110: note = Description of Artificial Sequence: Syntheticpolypeptide

SEQ ID NO: 1534 - protein, 110 aa, synthetic construct; identical to SEQ ID NO: 123
  REGION 1..110: note = Description of Artificial Sequence: Syntheticpolypeptide

SEQ ID NO: 1535 - protein, 110 aa, synthetic construct; identical to SEQ ID NO: 123
  REGION 1..110: note = Description of Artificial Sequence: Syntheticpolypeptide

SEQ ID NO: 1536 - protein, 110 aa, synthetic construct; identical to SEQ ID NO: 123
  REGION 1..110: note = Description of Artificial Sequence: Syntheticpolypeptide

SEQ ID NO: 1537 - protein, 110 aa, synthetic construct; identical to SEQ ID NO: 123
  REGION 1..110: note = Description of Artificial Sequence: Syntheticpolypeptide

SEQ ID NO: 1538 - protein, 110 aa, synthetic construct; identical to SEQ ID NO: 123
  REGION 1..110: note = Description of Artificial Sequence: Syntheticpolypeptide

SEQ ID NO: 1539 - protein, 110 aa, synthetic construct; identical to SEQ ID NO: 123
  REGION 1..110: note = Description of Artificial Sequence: Syntheticpolypeptide

SEQ ID NO: 1540 - protein, 110 aa, synthetic construct; identical to SEQ ID NO: 123
  REGION 1..110: note = Description of Artificial Sequence: Syntheticpolypeptide

SEQ ID NO: 1541 - protein, 110 aa, synthetic construct; identical to SEQ ID NO: 123
  REGION 1..110: note = Description of Artificial Sequence: Syntheticpolypeptide

SEQ ID NO: 1542 - protein, 110 aa, synthetic construct; identical to SEQ ID NO: 123
  REGION 1..110: note = Description of Artificial Sequence: Syntheticpolypeptide

SEQ ID NO: 1543 - protein, 110 aa, synthetic construct; identical to SEQ ID NO: 123
  REGION 1..110: note = Description of Artificial Sequence: Syntheticpolypeptide

SEQ ID NO: 1544 - protein, 110 aa, synthetic construct; identical to SEQ ID NO: 123
  REGION 1..110: note = Description of Artificial Sequence: Syntheticpolypeptide

SEQ ID NO: 1545 - protein, 110 aa, synthetic construct; identical to SEQ ID NO: 123
  REGION 1..110: note = Description of Artificial Sequence: Syntheticpolypeptide

SEQ ID NO: 1546 - protein, 110 aa, synthetic construct; identical to SEQ ID NO: 123
  REGION 1..110: note = Description of Artificial Sequence: Syntheticpolypeptide

SEQ ID NO: 1547 - protein, 110 aa, synthetic construct; identical to SEQ ID NO: 123
  REGION 1..110: note = Description of Artificial Sequence: Syntheticpolypeptide

SEQ ID NO: 1548 - protein, 110 aa, synthetic construct; identical to SEQ ID NO: 123
  REGION 1..110: note = Description of Artificial Sequence: Syntheticpolypeptide

SEQ ID NO: 1549 - protein, 110 aa, synthetic construct; identical to SEQ ID NO: 123
  REGION 1..110: note = Description of Artificial Sequence: Syntheticpolypeptide

SEQ ID NO: 1550 - protein, 110 aa, synthetic construct; identical to SEQ ID NO: 123
  REGION 1..110: note = Description of Artificial Sequence: Syntheticpolypeptide

SEQ ID NO: 1551 - protein, 110 aa, synthetic construct; identical to SEQ ID NO: 123
  REGION 1..110: note = Description of Artificial Sequence: Syntheticpolypeptide

SEQ ID NO: 1552 - protein, 110 aa, synthetic construct; identical to SEQ ID NO: 123
  REGION 1..110: note = Description of Artificial Sequence: Syntheticpolypeptide

SEQ ID NO: 1553 - protein, 110 aa, synthetic construct; identical to SEQ ID NO: 123
  REGION 1..110: note = Description of Artificial Sequence: Syntheticpolypeptide

SEQ ID NO: 1554 - protein, 110 aa, synthetic construct; identical to SEQ ID NO: 123
  REGION 1..110: note = Description of Artificial Sequence: Syntheticpolypeptide

SEQ ID NO: 1555 - protein, 110 aa, synthetic construct; identical to SEQ ID NO: 123
  REGION 1..110: note = Description of Artificial Sequence: Syntheticpolypeptide

SEQ ID NO: 1556 - protein, 110 aa, synthetic construct; identical to SEQ ID NO: 123
  REGION 1..110: note = Description of Artificial Sequence: Syntheticpolypeptide

SEQ ID NO: 1557 - protein, 110 aa, synthetic construct; identical to SEQ ID NO: 123
  REGION 1..110: note = Description of Artificial Sequence: Syntheticpolypeptide

SEQ ID NO: 1558 - protein, 110 aa, synthetic construct; identical to SEQ ID NO: 123
  REGION 1..110: note = Description of Artificial Sequence: Syntheticpolypeptide

SEQ ID NO: 1559 - protein, 110 aa, synthetic construct; identical to SEQ ID NO: 123
  REGION 1..110: note = Description of Artificial Sequence: Syntheticpolypeptide

SEQ ID NO: 1560 - protein, 110 aa, synthetic construct; identical to SEQ ID NO: 123
  REGION 1..110: note = Description of Artificial Sequence: Syntheticpolypeptide

SEQ ID NO: 1561 - protein, 110 aa, synthetic construct; identical to SEQ ID NO: 123
  REGION 1..110: note = Description of Artificial Sequence: Syntheticpolypeptide

SEQ ID NO: 1562 - protein, 110 aa, synthetic construct; identical to SEQ ID NO: 123
  REGION 1..110: note = Description of Artificial Sequence: Syntheticpolypeptide

SEQ ID NO: 1563 - protein, 110 aa, synthetic construct; identical to SEQ ID NO: 123
  REGION 1..110: note = Description of Artificial Sequence: Syntheticpolypeptide

SEQ ID NO: 1564 - protein, 110 aa, synthetic construct; identical to SEQ ID NO: 123
  REGION 1..110: note = Description of Artificial Sequence: Syntheticpolypeptide

SEQ ID NO: 1565 - protein, 110 aa, synthetic construct; identical to SEQ ID NO: 123
  REGION 1..110: note = Description of Artificial Sequence: Syntheticpolypeptide

SEQ ID NO: 1566 - protein, 110 aa, synthetic construct; identical to SEQ ID NO: 123
  REGION 1..110: note = Description of Artificial Sequence: Syntheticpolypeptide

SEQ ID NO: 1567 - protein, 110 aa, synthetic construct; identical to SEQ ID NO: 123
  REGION 1..110: note = Description of Artificial Sequence: Syntheticpolypeptide

SEQ ID NO: 1568 - protein, 110 aa, synthetic construct; identical to SEQ ID NO: 123
  REGION 1..110: note = Description of Artificial Sequence: Syntheticpolypeptide

SEQ ID NO: 1569 - protein, 110 aa, synthetic construct; identical to SEQ ID NO: 123
  REGION 1..110: note = Description of Artificial Sequence: Syntheticpolypeptide

SEQ ID NO: 1570 - protein, 110 aa, synthetic construct; identical to SEQ ID NO: 123
  REGION 1..110: note = Description of Artificial Sequence: Syntheticpolypeptide

SEQ ID NO: 1571 - protein, 110 aa, synthetic construct; identical to SEQ ID NO: 123
  REGION 1..110: note = Description of Artificial Sequence: Syntheticpolypeptide

SEQ ID NO: 1572 - protein, 110 aa, synthetic construct; identical to SEQ ID NO: 123
  REGION 1..110: note = Description of Artificial Sequence: Syntheticpolypeptide

SEQ ID NO: 1573 - protein, 110 aa, synthetic construct; identical to SEQ ID NO: 123
  REGION 1..110: note = Description of Artificial Sequence: Syntheticpolypeptide

SEQ ID NO: 1574 - protein, 110 aa, synthetic construct; identical to SEQ ID NO: 123
  REGION 1..110: note = Description of Artificial Sequence: Syntheticpolypeptide

SEQ ID NO: 1575 - protein, 110 aa, synthetic construct; identical to SEQ ID NO: 123
  REGION 1..110: note = Description of Artificial Sequence: Syntheticpolypeptide

SEQ ID NO: 1576 - protein, 110 aa, synthetic construct; identical to SEQ ID NO: 123
  REGION 1..110: note = Description of Artificial Sequence: Syntheticpolypeptide

SEQ ID NO: 1577 - protein, 110 aa, synthetic construct; identical to SEQ ID NO: 123
  REGION 1..110: note = Description of Artificial Sequence: Syntheticpolypeptide

SEQ ID NO: 1578 - protein, 110 aa, synthetic construct; identical to SEQ ID NO: 123
  REGION 1..110: note = Description of Artificial Sequence: Syntheticpolypeptide

SEQ ID NO: 1579 - protein, 110 aa, synthetic construct; identical to SEQ ID NO: 123
  REGION 1..110: note = Description of Artificial Sequence: Syntheticpolypeptide

SEQ ID NO: 1580 - protein, 110 aa, synthetic construct; identical to SEQ ID NO: 123
  REGION 1..110: note = Description of Artificial Sequence: Syntheticpolypeptide

SEQ ID NO: 1581 - protein, 110 aa, synthetic construct; identical to SEQ ID NO: 123
  REGION 1..110: note = Description of Artificial Sequence: Syntheticpolypeptide

SEQ ID NO: 1582 - protein, 110 aa, synthetic construct; identical to SEQ ID NO: 123
  REGION 1..110: note = Description of Artificial Sequence: Syntheticpolypeptide

SEQ ID NO: 1583 - protein, 110 aa, synthetic construct; identical to SEQ ID NO: 123
  REGION 1..110: note = Description of Artificial Sequence: Syntheticpolypeptide

SEQ ID NO: 1584 - protein, 110 aa, synthetic construct; identical to SEQ ID NO: 123
  REGION 1..110: note = Description of Artificial Sequence: Syntheticpolypeptide

SEQ ID NO: 1585 - protein, 110 aa, synthetic construct; identical to SEQ ID NO: 123
  REGION 1..110: note = Description of Artificial Sequence: Syntheticpolypeptide

SEQ ID NO: 1586 - protein, 110 aa, synthetic construct; identical to SEQ ID NO: 123
  REGION 1..110: note = Description of Artificial Sequence: Syntheticpolypeptide

SEQ ID NO: 1587 - protein, 110 aa, synthetic construct; identical to SEQ ID NO: 123
  REGION 1..110: note = Description of Artificial Sequence: Syntheticpolypeptide

SEQ ID NO: 1588 - protein, 110 aa, synthetic construct; identical to SEQ ID NO: 123
  REGION 1..110: note = Description of Artificial Sequence: Syntheticpolypeptide

SEQ ID NO: 1589 - protein, 110 aa, synthetic construct; identical to SEQ ID NO: 123
  REGION 1..110: note = Description of Artificial Sequence: Syntheticpolypeptide

SEQ ID NO: 1590 - protein, 110 aa, synthetic construct; identical to SEQ ID NO: 123
  REGION 1..110: note = Description of Artificial Sequence: Syntheticpolypeptide

SEQ ID NO: 1591 - protein, 110 aa, synthetic construct; identical to SEQ ID NO: 123
  REGION 1..110: note = Description of Artificial Sequence: Syntheticpolypeptide

SEQ ID NO: 1592 - protein, 110 aa, synthetic construct; identical to SEQ ID NO: 123
  REGION 1..110: note = Description of Artificial Sequence: Syntheticpolypeptide

SEQ ID NO: 1593 - protein, 110 aa, synthetic construct; identical to SEQ ID NO: 123
  REGION 1..110: note = Description of Artificial Sequence: Syntheticpolypeptide

SEQ ID NO: 1594 - protein, 110 aa, synthetic construct; identical to SEQ ID NO: 123
  REGION 1..110: note = Description of Artificial Sequence: Syntheticpolypeptide

SEQ ID NO: 1595 - protein, 110 aa, synthetic construct; identical to SEQ ID NO: 123
  REGION 1..110: note = Description of Artificial Sequence: Syntheticpolypeptide

SEQ ID NO: 1596 - protein, 110 aa, synthetic construct; identical to SEQ ID NO: 123
  REGION 1..110: note = Description of Artificial Sequence: Syntheticpolypeptide

SEQ ID NO: 1597 - protein, 110 aa, synthetic construct; identical to SEQ ID NO: 123
  REGION 1..110: note = Description of Artificial Sequence: Syntheticpolypeptide

SEQ ID NO: 1598 - protein, 110 aa, synthetic construct; identical to SEQ ID NO: 123
  REGION 1..110: note = Description of Artificial Sequence: Syntheticpolypeptide

SEQ ID NO: 1599 - protein, 110 aa, synthetic construct; identical to SEQ ID NO: 123
  REGION 1..110: note = Description of Artificial Sequence: Syntheticpolypeptide

SEQ ID NO: 1600 - protein, 110 aa, synthetic construct; identical to SEQ ID NO: 123
  REGION 1..110: note = Description of Artificial Sequence: Syntheticpolypeptide

SEQ ID NO: 1601 - protein, 110 aa, synthetic construct; identical to SEQ ID NO: 123
  REGION 1..110: note = Description of Artificial Sequence: Syntheticpolypeptide

SEQ ID NO: 1602 - protein, 110 aa, synthetic construct; identical to SEQ ID NO: 123
  REGION 1..110: note = Description of Artificial Sequence: Syntheticpolypeptide

SEQ ID NO: 1603 - protein, 110 aa, synthetic construct; identical to SEQ ID NO: 123
  REGION 1..110: note = Description of Artificial Sequence: Syntheticpolypeptide

SEQ ID NO: 1604 - protein, 110 aa, synthetic construct; identical to SEQ ID NO: 123
  REGION 1..110: note = Description of Artificial Sequence: Syntheticpolypeptide

SEQ ID NO: 1605 - protein, 110 aa, synthetic construct; identical to SEQ ID NO: 123
  REGION 1..110: note = Description of Artificial Sequence: Syntheticpolypeptide

SEQ ID NO: 1606 - protein, 110 aa, synthetic construct; identical to SEQ ID NO: 123
  REGION 1..110: note = Description of Artificial Sequence: Syntheticpolypeptide

SEQ ID NO: 1607 - protein, 110 aa, synthetic construct; identical to SEQ ID NO: 123
  REGION 1..110: note = Description of Artificial Sequence: Syntheticpolypeptide

SEQ ID NO: 1608 - protein, 110 aa, synthetic construct; identical to SEQ ID NO: 123
  REGION 1..110: note = Description of Artificial Sequence: Syntheticpolypeptide

SEQ ID NO: 1609 - protein, 110 aa, synthetic construct; identical to SEQ ID NO: 123
  REGION 1..110: note = Description of Artificial Sequence: Syntheticpolypeptide

SEQ ID NO: 1610 - protein, 110 aa, synthetic construct; identical to SEQ ID NO: 123
  REGION 1..110: note = Description of Artificial Sequence: Syntheticpolypeptide

SEQ ID NO: 1611 - protein, 110 aa, synthetic construct; identical to SEQ ID NO: 123
  REGION 1..110: note = Description of Artificial Sequence: Syntheticpolypeptide

SEQ ID NO: 1612 - protein, 110 aa, synthetic construct; identical to SEQ ID NO: 123
  REGION 1..110: note = Description of Artificial Sequence: Syntheticpolypeptide

SEQ ID NO: 1613 - protein, 110 aa, synthetic construct
  REGION 1..110: note = Description of Artificial Sequence: Syntheticpolypeptide
QSVLTQPPSASGTPGQRVTISCTGSSSNIGSSSVSWYQQLPGTAPKLLIYKNNQRPSGVPDRFSGSKSGTSASLAISGLRSEDEADYYCSTWDDSLSVRVFGGGTKLTVL

SEQ ID NO: 1614 - protein, 110 aa, synthetic construct
  REGION 1..110: note = Description of Artificial Sequence: Syntheticpolypeptide
QSVLTQPPSASGTPGQRVTISCSGSSTNIGSSSVSWYQQLPGTAPKLLIYKNNYRPSGVPDRFSGSKSGTSASLAISGLRSEDEADYYCSTWDDSLSVRVFGGGTKLTVL

SEQ ID NO: 1615 - protein, 110 aa, synthetic construct; identical to SEQ ID NO: 123
  REGION 1..110: note = Description of Artificial Sequence: Syntheticpolypeptide

SEQ ID NO: 1616 - protein, 110 aa, synthetic construct; identical to SEQ ID NO: 1613
  REGION 1..110: note = Description of Artificial Sequence: Syntheticpolypeptide

SEQ ID NO: 1617 - protein, 110 aa, synthetic construct
  REGION 1..110: note = Description of Artificial Sequence: Syntheticpolypeptide
QSVLTQPPSASGTPGQRVTISCSGASSNIGSSSVSWYQQLPGTAPKLLIYKNNQRPSGVPDRFSGSKSGTSASLAISGLRSEDEADYYCSTWDDSLSVRVFGGGTKLTVL

SEQ ID NO: 1618 - protein, 110 aa, synthetic construct
  REGION 1..110: note = Description of Artificial Sequence: Syntheticpolypeptide
QSVLTQPPSASGTPGQRVTISCSGSPSNIGSSSVSWYQQLPGTAPKLLIYKNNQRPSGVPDRFSGSKSGTSASLAISGLRSEDEADYYCSTWDDSLSVRVFGGGTKLTVL

SEQ ID NO: 1619 - protein, 110 aa, synthetic construct
  REGION 1..110: note = Description of Artificial Sequence: Syntheticpolypeptide
QSVLTQPPSASGTPGQRVTISCSGSKSNIGSSSVSWYQQLPGTAPKLLIYKNNQRPSGVPDRFSGSKSGTSASLAISGLRSEDEADYYCSTWDDSLSVRVFGGGTKLTVL

SEQ ID NO: 1620 - protein, 110 aa, synthetic construct
  REGION 1..110: note = Description of Artificial Sequence: Syntheticpolypeptide
QSVLTQPPSASGTPGQRVTISCSGSSTNIGSSSVSWYQQLPGTAPKLLIYKNNQRPSGVPDRFSGSKSGTSASLAISGLRSEDEADYYCSTWDDSLSVRVFGGGTKLTVL

SEQ ID NO: 1621 - protein, 110 aa, synthetic construct
  REGION 1..110: note = Description of Artificial Sequence: Syntheticpolypeptide
QSVLTQPPSASGTPGQRVTISCSGSSSDIGSSSVSWYQQLPGTAPKLLIYKNNQRPSGVPDRFSGSKSGTSASLAISGLRSEDEADYYCSTWDDSLSVRVFGGGTKLTVL

SEQ ID NO: 1622 - protein, 110 aa, synthetic construct
  REGION 1..110: note = Description of Artificial Sequence: Syntheticpolypeptide
QSVLTQPPSASGTPGQRVTISCSGSSSNIQSSSVSWYQQLPGTAPKLLIYKNNQRPSGVPDRFSGSKSGTSASLAISGLRSEDEADYYCSTWDDSLSVRVFGGGTKLTVL

SEQ ID NO: 1623 - protein, 110 aa, synthetic construct
  REGION 1..110: note = Description of Artificial Sequence: Syntheticpolypeptide
QSVLTQPPSASGTPGQRVTISCSGSSSNIGHSSVSWYQQLPGTAPKLLIYKNNQRPSGVPDRFSGSKSGTSASLAISGLRSEDEADYYCSTWDDSLSVRVFGGGTKLTVL

SEQ ID NO: 1624 - protein, 110 aa, synthetic construct
  REGION 1..110: note = Description of Artificial Sequence: Syntheticpolypeptide
QSVLTQPPSASGTPGQRVTISCSGSSSNIGSTSVSWYQQLPGTAPKLLIYKNNQRPSGVPDRFSGSKSGTSASLAISGLRSEDEADYYCSTWDDSLSVRVFGGGTKLTVL

SEQ ID NO: 1625 - protein, 110 aa, synthetic construct
  REGION 1..110: note = Description of Artificial Sequence: Syntheticpolypeptide
QSVLTQPPSASGTPGQRVTISCSGSSSNIGSNSVSWYQQLPGTAPKLLIYKNNQRPSGVPDRFSGSKSGTSASLAISGLRSEDEADYYCSTWDDSLSVRVFGGGTKLTVL

SEQ ID NO: 1626 - protein, 110 aa, synthetic construct
  REGION 1..110: note = Description of Artificial Sequence: Syntheticpolypeptide
QSVLTQPPSASGTPGQRVTISCSGSSSNIGSASVSWYQQLPGTAPKLLIYKNNQRPSGVPDRFSGSKSGTSASLAISGLRSEDEADYYCSTWDDSLSVRVFGGGTKLTVL

SEQ ID NO: 1627 - protein, 110 aa, synthetic construct
  REGION 1..110: note = Description of Artificial Sequence: Syntheticpolypeptide
QSVLTQPPSASGTPGQRVTISCSGSSSNIGSSTVSWYQQLPGTAPKLLIYKNNQRPSGVPDRFSGSKSGTSASLAISGLRSEDEADYYCSTWDDSLSVRVFGGGTKLTVL

SEQ ID NO: 1628 - protein, 110 aa, synthetic construct
  REGION 1..110: note = Description of Artificial Sequence: Syntheticpolypeptide
QSVLTQPPSASGTPGQRVTISCSGSSSNIGSSAVSWYQQLPGTAPKLLIYKNNQRPSGVPDRFSGSKSGTSASLAISGLRSEDEADYYCSTWDDSLSVRVFGGGTKLTVL

SEQ ID NO: 1629 - protein, 110 aa, synthetic construct
  REGION 1..110: note = Description of Artificial Sequence: Syntheticpolypeptide
QSVLTQPPSASGTPGQRVTISCSGSSSNIGSSYVSWYQQLPGTAPKLLIYKNNQRPSGVPDRFSGSKSGTSASLAISGLRSEDEADYYCSTWDDSLSVRVFGGGTKLTVL

SEQ ID NO: 1630 - protein, 110 aa, synthetic construct
  REGION 1..110: note = Description of Artificial Sequence: Syntheticpolypeptide
QSVLTQPPSASGTPGQRVTISCSGSSSNIGSSSTSWYQQLPGTAPKLLIYKNNQRPSGVPDRFSGSKSGTSASLAISGLRSEDEADYYCSTWDDSLSVRVFGGGTKLTVL

SEQ ID NO: 1631 - protein, 110 aa, synthetic construct
  REGION 1..110: note = Description of Artificial Sequence: Syntheticpolypeptide
QSVLTQPPSASGTPGQRVTISCSGSSSNIGSSSVAWYQQLPGTAPKLLIYKNNQRPSGVPDRFSGSKSGTSASLAISGLRSEDEADYYCSTWDDSLSVRVFGGGTKLTVL

SEQ ID NO: 1632 - protein, 110 aa, synthetic construct
  REGION 1..110: note = Description of Artificial Sequence: Syntheticpolypeptide
QSVLTQPPSASGTPGQRVTISCSGSSSNIGSSSVTWYQQLPGTAPKLLIYKNNQRPSGVPDRFSGSKSGTSASLAISGLRSEDEADYYCSTWDDSLSVRVFGGGTKLTVL

SEQ ID NO: 1633 - protein, 110 aa, synthetic construct
  REGION 1..110: note = Description of Artificial Sequence: Syntheticpolypeptide
QSVLTQPPSASGTPGQRVTISCSGSSSNIGSSSVSWYQQLPGTAPKLLIYRNNQRPSGVPDRFSGSKSGTSASLAISGLRSEDEADYYCSTWDDSLSVRVFGGGTKLTVL

SEQ ID NO: 1634 - protein, 110 aa, synthetic construct
  REGION 1..110: note = Description of Artificial Sequence: Syntheticpolypeptide
QSVLTQPPSASGTPGQRVTISCSGSSSNIGSSSVSWYQQLPGTAPKLLIYNNNQRPSGVPDRFSGSKSGTSASLAISGLRSEDEADYYCSTWDDSLSVRVFGGGTKLTVL

SEQ ID NO: 1635 - protein, 110 aa, synthetic construct
  REGION 1..110: note = Description of Artificial Sequence: Syntheticpolypeptide
QSVLTQPPSASGTPGQRVTISCSGSSSNIGSSSVSWYQQLPGTAPKLLIYMNNQRPSGVPDRFSGSKSGTSASLAISGLRSEDEADYYCSTWDDSLSVRVFGGGTKLTVL

SEQ ID NO: 1636 - protein, 110 aa, synthetic construct
  REGION 1..110: note = Description of Artificial Sequence: Syntheticpolypeptide
QSVLTQPPSASGTPGQRVTISCSGSSSNIGSSSVSWYQQLPGTAPKLLIYANNQRPSGVPDRFSGSKSGTSASLAISGLRSEDEADYYCSTWDDSLSVRVFGGGTKLTVL

SEQ ID NO: 1637 - protein, 110 aa, synthetic construct
  REGION 1..110: note = Description of Artificial Sequence: Syntheticpolypeptide
QSVLTQPPSASGTPGQRVTISCSGSSSNIGSSSVSWYQQLPGTAPKLLIYHNNQRPSGVPDRFSGSKSGTSASLAISGLRSEDEADYYCSTWDDSLSVRVFGGGTKLTVL

SEQ ID NO: 1638 - protein, 110 aa, synthetic construct
  REGION 1..110: note = Description of Artificial Sequence: Syntheticpolypeptide
QSVLTQPPSASGTPGQRVTISCSGSSSNIGSSSVSWYQQLPGTAPKLLIYKDNQRPSGVPDRFSGSKSGTSASLAISGLRSEDEADYYCSTWDDSLSVRVFGGGTKLTVL

SEQ ID NO: 1639 - protein, 110 aa, synthetic construct
  REGION 1..110: note = Description of Artificial Sequence: Syntheticpolypeptide
QSVLTQPPSASGTPGQRVTISCSGSSSNIGSSSVSWYQQLPGTAPKLLIYKNTQRPSGVPDRFSGSKSGTSASLAISGLRSEDEADYYCSTWDDSLSVRVFGGGTKLTVL

SEQ ID NO: 1640 - protein, 110 aa, synthetic construct
  REGION 1..110: note = Description of Artificial Sequence: Syntheticpolypeptide
QSVLTQPPSASGTPGQRVTISCSGSSSNIGSSSVSWYQQLPGTAPKLLIYKNNYRPSGVPDRFSGSKSGTSASLAISGLRSEDEADYYCSTWDDSLSVRVFGGGTKLTVL

SEQ ID NO: 1641 - protein, 110 aa, synthetic construct
  REGION 1..110: note = Description of Artificial Sequence: Syntheticpolypeptide
QSVLTQPPSASGTPGQRVTISCSGSSSNIGSSSVSWYQQLPGTAPKLLIYKNNARPSGVPDRFSGSKSGTSASLAISGLRSEDEADYYCSTWDDSLSVRVFGGGTKLTVL

SEQ ID NO: 1642 - protein, 110 aa, synthetic construct
  REGION 1..110: note = Description of Artificial Sequence: Syntheticpolypeptide
QSVLTQPPSASGTPGQRVTISCSGSSSNIGSSSVSWYQQLPGTAPKLLIYKNNLRPSGVPDRFSGSKSGTSASLAISGLRSEDEADYYCSTWDDSLSVRVFGGGTKLTVL

SEQ ID NO: 1643 - protein, 110 aa, synthetic construct
  REGION 1..110: note = Description of Artificial Sequence: Syntheticpolypeptide
QSVLTQPPSASGTPGQRVTISCSGSSSNIGSSSVSWYQQLPGTAPKLLIYKNNQQPSGVPDRFSGSKSGTSASLAISGLRSEDEADYYCSTWDDSLSVRVFGGGTKLTVL

SEQ ID NO: 1644 - protein, 110 aa, synthetic construct
  REGION 1..110: note = Description of Artificial Sequence: Syntheticpolypeptide
QSVLTQPPSASGTPGQRVTISCSGSSSNIGSSSVSWYQQLPGTAPKLLIYKNNQRASGVPDRFSGSKSGTSASLAISGLRSEDEADYYCSTWDDSLSVRVFGGGTKLTVL

SEQ ID NO: 1645 - protein, 110 aa, synthetic construct
  REGION 1..110: note = Description of Artificial Sequence: Syntheticpolypeptide
QSVLTQPPSASGTPGQRVTISCSGSSSNIGSSSVSWYQQLPGTAPKLLIYKNNQRPYGVPDRFSGSKSGTSASLAISGLRSEDEADYYCSTWDDSLSVRVFGGGTKLTVL

SEQ ID NO: 1646 - protein, 110 aa, synthetic construct
  REGION 1..110: note = Description of Artificial Sequence: Syntheticpolypeptide
QSVLTQPPSASGTPGQRVTISCSGSSSNIGSSSVSWYQQLPGTAPKLLIYKNNQRPLGVPDRFSGSKSGTSASLAISGLRSEDEADYYCSTWDDSLSVRVFGGGTKLTVL

SEQ ID NO: 1647 - protein, 110 aa, synthetic construct
  REGION 1..110: note = Description of Artificial Sequence: Syntheticpolypeptide
QSVLTQPPSASGTPGQRVTISCSGSSSNIGSSSVSWYQQLPGTAPKLLIYKNNQRPSGVPDRFSGSKSGTSASLAISGLRSEDEADYYCATWDDSLSVRVFGGGTKLTVL

SEQ ID NO: 1648 - protein, 110 aa, synthetic construct
  REGION 1..110: note = Description of Artificial Sequence: Syntheticpolypeptide
QSVLTQPPSASGTPGQRVTISCSGSSSNIGSSSVSWYQQLPGTAPKLLIYKNNQRPSGVPDRFSGSKSGTSASLAISGLRSEDEADYYCSSWDDSLSVRVFGGGTKLTVL

SEQ ID NO: 1649 - protein, 110 aa, synthetic construct
  REGION 1..110: note = Description of Artificial Sequence: Syntheticpolypeptide
QSVLTQPPSASGTPGQRVTISCSGSSSNIGSSSVSWYQQLPGTAPKLLIYKNNQRPSGVPDRFSGSKSGTSASLAISGLRSEDEADYYCSTFDDSLSVRVFGGGTKLTVL

SEQ ID NO: 1650 - protein, 110 aa, synthetic construct
  REGION 1..110: note = Description of Artificial Sequence: Syntheticpolypeptide
QSVLTQPPSASGTPGQRVTISCSGSSSNIGSSSVSWYQQLPGTAPKLLIYKNNQRPSGVPDRFSGSKSGTSASLAISGLRSEDEADYYCSTWDNSLSVRVFGGGTKLTVL

SEQ ID NO: 1651 - protein, 110 aa, synthetic construct
  REGION 1..110: note = Description of Artificial Sequence: Syntheticpolypeptide
QSVLTQPPSASGTPGQRVTISCSGSSSNIGSSSVSWYQQLPGTAPKLLIYKNNQRPSGVPDRFSGSKSGTSASLAISGLRSEDEADYYCSTWDDQLSVRVFGGGTKLTVL

SEQ ID NO: 1652 - protein, 110 aa, synthetic construct
  REGION 1..110: note = Description of Artificial Sequence: Syntheticpolypeptide
QSVLTQPPSASGTPGQRVTISCSGSSSNIGSSSVSWYQQLPGTAPKLLIYKNNQRPSGVPDRFSGSKSGTSASLAISGLRSEDEADYYCSTWDDALSVRVFGGGTKLTVL

SEQ ID NO: 1653 - protein, 110 aa, synthetic construct
  REGION 1..110: note = Description of Artificial Sequence: Syntheticpolypeptide
QSVLTQPPSASGTPGQRVTISCSGSSSNIGSSSVSWYQQLPGTAPKLLIYKNNQRPSGVPDRFSGSKSGTSASLAISGLRSEDEADYYCSTWDDDLSVRVFGGGTKLTVL

SEQ ID NO: 1654 - protein, 110 aa, synthetic construct
  REGION 1..110: note = Description of Artificial Sequence: Syntheticpolypeptide
QSVLTQPPSASGTPGQRVTISCSGSSSNIGSSSVSWYQQLPGTAPKLLIYKNNQRPSGVPDRFSGSKSGTSASLAISGLRSEDEADYYCSTWDDSNSVRVFGGGTKLTVL

SEQ ID NO: 1655 - protein, 110 aa, synthetic construct
  REGION 1..110: note = Description of Artificial Sequence: Syntheticpolypeptide
QSVLTQPPSASGTPGQRVTISCSGSSSNIGSSSVSWYQQLPGTAPKLLIYKNNQRPSGVPDRFSGSKSGTSASLAISGLRSEDEADYYCSTWDDSSSVRVFGGGTKLTVL

SEQ ID NO: 1656 - protein, 110 aa, synthetic construct
  REGION 1..110: note = Description of Artificial Sequence: Syntheticpolypeptide
QSVLTQPPSASGTPGQRVTISCSGSSSNIGSSSVSWYQQLPGTAPKLLIYKNNQRPSGVPDRFSGSKSGTSASLAISGLRSEDEADYYCSTWDDSLNVRVFGGGTKLTVL

SEQ ID NO: 1657 - protein, 110 aa, synthetic construct
  REGION 1..110: note = Description of Artificial Sequence: Syntheticpolypeptide
QSVLTQPPSASGTPGQRVTISCSGSSSNIGSSSVSWYQQLPGTAPKLLIYKNNQRPSGVPDRFSGSKSGTSASLAISGLRSEDEADYYCSTWDDSLLVRVFGGGTKLTVL

SEQ ID NO: 1658 - protein, 110 aa, synthetic construct
  REGION 1..110: note = Description of Artificial Sequence: Syntheticpolypeptide
QSVLTQPPSASGTPGQRVTISCSGSSSNIGSSSVSWYQQLPGTAPKLLIYKNNQRPSGVPDRFSGSKSGTSASLAISGLRSEDEADYYCSTWDDSLTVRVFGGGTKLTVL

SEQ ID NO: 1659 - protein, 110 aa, synthetic construct
  REGION 1..110: note = Description of Artificial Sequence: Syntheticpolypeptide
QSVLTQPPSASGTPGQRVTISCSGSSSNIGSSSVSWYQQLPGTAPKLLIYKNNQRPSGVPDRFSGSKSGTSASLAISGLRSEDEADYYCSTWDDSLSIRVFGGGTKLTVL

SEQ ID NO: 1660 - protein, 110 aa, synthetic construct
  REGION 1..110: note = Description of Artificial Sequence: Syntheticpolypeptide
QSVLTQPPSASGTPGQRVTISCSGSSSNIGSSSVSWYQQLPGTAPKLLIYKNNQRPSGVPDRFSGSKSGTSASLAISGLRSEDEADYYCSTWDDSLSVKVFGGGTKLTVL

SEQ ID NO: 1661 - protein, 110 aa, synthetic construct
  REGION 1..110: note = Description of Artificial Sequence: Syntheticpolypeptide
QSVLTQPPSASGTPGQRVTISCSGSSSNIGSSSVSWYQQLPGTAPKLLIYKNNQRPSGVPDRFSGSKSGTSASLAISGLRSEDEADYYCSTWDDSLSVWVFGGGTKLTVL

SEQ ID NO: 1662 - protein, 110 aa, synthetic construct
  REGION 1..110: note = Description of Artificial Sequence: Syntheticpolypeptide
QSVLTQPPSASGTPGQRVTISCSGSSSNIGSSSVSWYQQLPGTAPKLLIYKNNQRPSGVPDRFSGSKSGTSASLAISGLRSEDEADYYCSTWDDSLSVHVFGGGTKLTVL

SEQ ID NO: 1663 - protein, 110 aa, synthetic construct
  REGION 1..110: note = Description of Artificial Sequence: Syntheticpolypeptide
QSVLTQPPSASGTPGQRVTISCSGSSSNIGSSSVSWYQQLPGTAPKLLIYKNNQRPSGVPDRFSGSKSGTSASLAISGLRSEDEADYYCSTWDDSLSVQVFGGGTKLTVL

SEQ ID NO: 1664 - protein, 110 aa, synthetic construct
  REGION 1..110: note = Description of Artificial Sequence: Syntheticpolypeptide
QSVLTQPPSASGTPGQRVTISCSGSSSNIGSSSVSWYQQLPGTAPKLLIYKNNQRPSGVPDRFSGSKSGTSASLAISGLRSEDEADYYCSTWDDSLSVRIFGGGTKLTVL

SEQ ID NO: 1665 - protein, 110 aa, synthetic construct
  REGION 1..110: note = Description of Artificial Sequence: Syntheticpolypeptide
QSVLTQPPSASGTPGQRVTISCSGSSSDIGSSSVSWYQQLPGTAPKLLIYKNNQRPSGVPDRFSGSKSGTSASLAISGLRSEDEADYYCSTWNDQLSVRVFGGGTKLTVL

SEQ ID NO: 1666 - protein, 110 aa, synthetic construct
  REGION 1..110: note = Description of Artificial Sequence: Syntheticpolypeptide
QSVLTQPPSASGTPGQRVTISCHGSESDIGSHDVLWYQQLPGTAPKLLIYKNNQRPSGVPDRFSGSKSGTSASLAISGLRSEDEADYYCSTWDDSLSVRVFGGGTKLTVL

SEQ ID NO: 1667 - protein, 110 aa, synthetic construct; identical to SEQ ID NO: 123
  REGION 1..110: note = Description of Artificial Sequence: Syntheticpolypeptide

SEQ ID NO: 1668 - protein, 110 aa, synthetic construct; identical to SEQ ID NO: 123
  REGION 1..110: note = Description of Artificial Sequence: Syntheticpolypeptide

SEQ ID NO: 1669 - protein, 110 aa, synthetic construct
  REGION 1..110: note = Description of Artificial Sequence: Syntheticpolypeptide
QSVLTQPPSVSGAPGQRVTISCSGSSSNIGSSSVSWYQQLPGTAPKLLIYKNNQRPSGVPDRFSGSKSGTSASLAITGLQAEDEADYYCSTWDDSLSVRVFGGGTKLTVL

SEQ ID NO: 1670 - protein, 110 aa, synthetic construct; identical to SEQ ID NO: 1669
  REGION 1..110: note = Description of Artificial Sequence: Syntheticpolypeptide

SEQ ID NO: 1671 - protein, 110 aa, synthetic construct; identical to SEQ ID NO: 123
  REGION 1..110: note = Description of Artificial Sequence: Syntheticpolypeptide

SEQ ID NO: 1672 - protein, 110 aa, synthetic construct; identical to SEQ ID NO: 123
  REGION 1..110: note = Description of Artificial Sequence: Syntheticpolypeptide

SEQ ID NO: 1673 - protein, 110 aa, synthetic construct; identical to SEQ ID NO: 123
  REGION 1..110: note = Description of Artificial Sequence: Syntheticpolypeptide

SEQ ID NO: 1674 - protein, 110 aa, synthetic construct; identical to SEQ ID NO: 123
  REGION 1..110: note = Description of Artificial Sequence: Syntheticpolypeptide

SEQ ID NO: 1675 - protein, 110 aa, synthetic construct; identical to SEQ ID NO: 123
  REGION 1..110: note = Description of Artificial Sequence: Syntheticpolypeptide

SEQ ID NO: 1676 - protein, 110 aa, synthetic construct; identical to SEQ ID NO: 123
  REGION 1..110: note = Description of Artificial Sequence: Syntheticpolypeptide

SEQ ID NO: 1677 - protein, 110 aa, synthetic construct; identical to SEQ ID NO: 123
  REGION 1..110: note = Description of Artificial Sequence: Syntheticpolypeptide

SEQ ID NO: 1678 - protein, 110 aa, synthetic construct; identical to SEQ ID NO: 123
  REGION 1..110: note = Description of Artificial Sequence: Syntheticpolypeptide

SEQ ID NO: 1679 - protein, 110 aa, synthetic construct; identical to SEQ ID NO: 123
  REGION 1..110: note = Description of Artificial Sequence: Syntheticpolypeptide

SEQ ID NO: 1680 - protein, 110 aa, synthetic construct; identical to SEQ ID NO: 123
  REGION 1..110: note = Description of Artificial Sequence: Syntheticpolypeptide

SEQ ID NO: 1681 - protein, 110 aa, synthetic construct; identical to SEQ ID NO: 123
  REGION 1..110: note = Description of Artificial Sequence: Syntheticpolypeptide

SEQ ID NO: 1682 - protein, 110 aa, synthetic construct; identical to SEQ ID NO: 123
  REGION 1..110: note = Description of Artificial Sequence: Syntheticpolypeptide

SEQ ID NO: 1683 - protein, 110 aa, synthetic construct; identical to SEQ ID NO: 123
  REGION 1..110: note = Description of Artificial Sequence: Syntheticpolypeptide

SEQ ID NO: 1684 - protein, 110 aa, synthetic construct; identical to SEQ ID NO: 123
  REGION 1..110: note = Description of Artificial Sequence: Syntheticpolypeptide

SEQ ID NO: 1685 - protein, 110 aa, synthetic construct; identical to SEQ ID NO: 123
  REGION 1..110: note = Description of Artificial Sequence: Syntheticpolypeptide

SEQ ID NO: 1686 - protein, 110 aa, synthetic construct; identical to SEQ ID NO: 123
  REGION 1..110: note = Description of Artificial Sequence: Syntheticpolypeptide

SEQ ID NO: 1687 - protein, 110 aa, synthetic construct; identical to SEQ ID NO: 123
  REGION 1..110: note = Description of Artificial Sequence: Syntheticpolypeptide

SEQ ID NO: 1688 - protein, 110 aa, synthetic construct; identical to SEQ ID NO: 123
  REGION 1..110: note = Description of Artificial Sequence: Syntheticpolypeptide

SEQ ID NO: 1689 - protein, 110 aa, synthetic construct; identical to SEQ ID NO: 123
  REGION 1..110: note = Description of Artificial Sequence: Syntheticpolypeptide

SEQ ID NO: 1690 - protein, 110 aa, synthetic construct; identical to SEQ ID NO: 123
  REGION 1..110: note = Description of Artificial Sequence: Syntheticpolypeptide

SEQ ID NO: 1691 - protein, 110 aa, synthetic construct; identical to SEQ ID NO: 123
  REGION 1..110: note = Description of Artificial Sequence: Syntheticpolypeptide

SEQ ID NO: 1692 - protein, 110 aa, synthetic construct; identical to SEQ ID NO: 123
  REGION 1..110: note = Description of Artificial Sequence: Syntheticpolypeptide

SEQ ID NO: 1693 - protein, 110 aa, synthetic construct; identical to SEQ ID NO: 123
  REGION 1..110: note = Description of Artificial Sequence: Syntheticpolypeptide

SEQ ID NO: 1694 - protein, 110 aa, synthetic construct; identical to SEQ ID NO: 123
  REGION 1..110: note = Description of Artificial Sequence: Syntheticpolypeptide

SEQ ID NO: 1695 - protein, 110 aa, synthetic construct; identical to SEQ ID NO: 123
  REGION 1..110: note = Description of Artificial Sequence: Syntheticpolypeptide

SEQ ID NO: 1696 - protein, 110 aa, synthetic construct; identical to SEQ ID NO: 123
  REGION 1..110: note = Description of Artificial Sequence: Syntheticpolypeptide

SEQ ID NO: 1697 - protein, 110 aa, synthetic construct; identical to SEQ ID NO: 123
  REGION 1..110: note = Description of Artificial Sequence: Syntheticpolypeptide

SEQ ID NO: 1698 - protein, 110 aa, synthetic construct; identical to SEQ ID NO: 123
  REGION 1..110: note = Description of Artificial Sequence: Syntheticpolypeptide

SEQ ID NO: 1699 - protein, 110 aa, synthetic construct; identical to SEQ ID NO: 123
  REGION 1..110: note = Description of Artificial Sequence: Syntheticpolypeptide

SEQ ID NO: 1700 - protein, 110 aa, synthetic construct; identical to SEQ ID NO: 123
  REGION 1..110: note = Description of Artificial Sequence: Syntheticpolypeptide

SEQ ID NO: 1701 - protein, 110 aa, synthetic construct; identical to SEQ ID NO: 123
  REGION 1..110: note = Description of Artificial Sequence: Syntheticpolypeptide

SEQ ID NO: 1702 - protein, 110 aa, synthetic construct; identical to SEQ ID NO: 123
  REGION 1..110: note = Description of Artificial Sequence: Syntheticpolypeptide

SEQ ID NO: 1703 - protein, 110 aa, synthetic construct; identical to SEQ ID NO: 123
  REGION 1..110: note = Description of Artificial Sequence: Syntheticpolypeptide

SEQ ID NO: 1704 - protein, 110 aa, synthetic construct
  REGION 1..110: note = Description of Artificial Sequence: Syntheticpolypeptide
QSVLTQPPSASGTPGQRVTISCSGSSTNIGSSSVYWYQQLPGTAPKLLIYKNNYRPSGVPDRFSGSKSGTSASLAISGLRSEDEADYYCSTWDDSLSVRVFGGGTKLTVL

SEQ ID NO: 1705 - protein, 110 aa, synthetic construct
  REGION 1..110: note = Description of Artificial Sequence: Syntheticpolypeptide
QSVLTQPPSASGTPGQRVTISCSGSSTNIGSSSVYWYQQLPGTAPKLLIYKNNYRASGVPDRFSGSKSGTSASLAISGLRSEDEADYYCSTWDDSLSVRVFGGGTKLTVL

SEQ ID NO: 1706 - protein, 110 aa, synthetic construct
  REGION 1..110: note = Description of Artificial Sequence: Syntheticpolypeptide
QSVLTQPPSASGTPGQRVTISCTGSSSNIGSSYVSWYQQLPGTAPKLLIYKNSLRPQGVPDRFSGSKSGTSASLAISGLRSEDEADYYCSTWDDSLSVRVFGGGTKLTVL

SEQ ID NO: 1707 - protein, 110 aa, synthetic construct; identical to SEQ ID NO: 1706
  REGION 1..110: note = Description of Artificial Sequence: Syntheticpolypeptide

SEQ ID NO: 1708 - protein, 110 aa, synthetic construct; identical to SEQ ID NO: 1706
  REGION 1..110: note = Description of Artificial Sequence: Syntheticpolypeptide

SEQ ID NO: 1709 - protein, 110 aa, synthetic construct; identical to SEQ ID NO: 1706
  REGION 1..110: note = Description of Artificial Sequence: Syntheticpolypeptide

SEQ ID NO: 1710 - protein, 110 aa, synthetic construct
  REGION 1..110: note = Description of Artificial Sequence: Syntheticpolypeptide
QSVLTQPPSASGTPGQRVTISCSGSPSNIGSASTSWYQQLPGTAPKLLIYKNNQRPSGVPDRFSGSKSGTSASLAISGLRSEDEADYYCSTWDDSLSVRVFGGGTKLTVL

SEQ ID NO: 1711 - protein, 110 aa, synthetic construct; identical to SEQ ID NO: 1710
  REGION 1..110: note = Description of Artificial Sequence: Syntheticpolypeptide

SEQ ID NO: 1712 - protein, 110 aa, synthetic construct; identical to SEQ ID NO: 1710
  REGION 1..110: note = Description of Artificial Sequence: Syntheticpolypeptide

SEQ ID NO: 1713 - protein, 110 aa, synthetic construct; identical to SEQ ID NO: 1710
  REGION 1..110: note = Description of Artificial Sequence: Syntheticpolypeptide

SEQ ID NO: 1714 - protein, 110 aa, synthetic construct; identical to SEQ ID NO: 1710
  REGION 1..110: note = Description of Artificial Sequence: Syntheticpolypeptide

SEQ ID NO: 1715 - protein, 110 aa, synthetic construct
  REGION 1..110: note = Description of Artificial Sequence: Syntheticpolypeptide
QSVLTQPPSASGTPGQRVTISCSGASSNIGHSSVYWYQQLPGTAPKLLIYRNNQQPLGVPDRFSGSKSGTSASLAISGLRSEDEADYYCSTWDDALSIRVFGGGTKLTVL

SEQ ID NO: 1716 - protein, 110 aa, synthetic construct
  REGION 1..110: note = Description of Artificial Sequence: Syntheticpolypeptide
QSVLTQPPSASGTPGQRVTISCSGSSSNIGSSSVSWYQQLPGTAPKLLIYKNTQRASGVPDRFSGSKSGTSASLAISGLRSEDEADYYCSTWDDALNVRVFGGGTKLTVL

SEQ ID NO: 1717 - protein, 110 aa, synthetic construct
  REGION 1..110: note = Description of Artificial Sequence: Syntheticpolypeptide
QSVLTQPPSASGTPGQRVTISCSGSSSNIGSSSVSWYQQLPGTAPKLLIYRNNQQPLGVPDRFSGSKSGTSASLAISGLRSEDEADYYCSSWDDSSLVRVFGGGTKLTVL

SEQ ID NO: 1718 - protein, 110 aa, synthetic construct
  REGION 1..110: note = Description of Artificial Sequence: Syntheticpolypeptide
QSVLTQPPSASGTPGQRVTISCSGSSSNIGSSSVTWYQQLPGTAPKLLIYKNNARPSGVPDRFSGSKSGTSASLAISGLRSEDEADYYCATWDNSLSIRVFGGGTKLTVL

SEQ ID NO: 1719 - protein, 110 aa, synthetic construct
  REGION 1..110: note = Description of Artificial Sequence: Syntheticpolypeptide
QSVLTQPPSASGTPGQRVTISCSGSKSNIGSSYVSWYQQLPGTAPKLLIYKDNQRASGVPDRFSGSKSGTSASLAISGLRSEDEADYYCSTWDDALSVRVFGGGTKLTVL

SEQ ID NO: 1720 - protein, 110 aa, synthetic construct; identical to SEQ ID NO: 158
  REGION 1..110: note = Description of Artificial Sequence: Syntheticpolypeptide

SEQ ID NO: 1721 - protein, 329 aa, synthetic construct
  REGION 1..329: note = Description of Artificial Sequence: Syntheticpolypeptide
ASTKGPSVFPLAPSSKSTSGGTAALGCLVKDYFPEPVTVSWNSGALTSGVHTFPAVLQSSGLYSLSSVVTVPSSSLGTQTYICNVNHKPSNTKVDKRVEPKSCDKTHTCPPCPAPELLGGPSVFLFPPKPKDTLMISRTPEVTCVVVDVSHEDPEVKFNWYVDGVEVHNAKTKPREEQYNSTYRVVSVLTVLHQDWLNGKEYKCKVSNKALPAPIEKTISKAKGQPREPQVYTLPPSREEMTKNQVSLTCLVKGFYPSDIAVEWESNGQPENNYKTTPPVLDSDGSFFLYSKLTVDKSRWQQGNVFSCSVMHEALHNHYTQKSLSLSPG

SEQ ID NO: 1722 - protein, 106 aa, synthetic construct
  REGION 1..106: note = Description of Artificial Sequence: Syntheticpolypeptide
GQPKAAPSVTLFPPSSEELQANKATLVCLVSDFYPGAVTVAWKADGSPVKVGVETTKPSKQSNNKYAASSYLSLTPEQWKSHRSYSCRVTHEGSTVEKTVAPAECS

SEQ ID NO: 1723 - protein, 469 aa, synthetic construct
  REGION 1..469: note = Description of Artificial Sequence: Syntheticpolypeptide
EVQLVESGGALVKPGGSLRLSCAASGFTFSKAWMSWVRQAPGKGLEWVGRIKSVTDGETTDYAAPVKGRFTISRDDSKSTLYLQMNSLKTEDTAVYYCTSSFCCRGGSCPSHDTSYCGGQYKSYYYMDVWGKGTTVTVSSASTKGPSVFPLAPSSKSTSGGTAALGCLVKDYFPEPVTVSWNSGALTSGVHTFPAVLQSSGLYSLSSVVTVPSSSLGTQTYICNVNHKPSNTKVDKRVEPKSCDKTHTCPPCPAPELLGGPSVFLFPPKPKDTLMISRTPEVTCVVVDVSHEDPEVKFNWYVDGVEVHNAKTKPREEQYNSTYRVVSVLTVLHQDWLNGKEYKCKVSNKALPAPIEKTISKAKGQPREPQVYTLPPSREEMTKNQVSLTCLVKGFYPSDIAVEWESNGQPENNYKTTPPVLDSDGSFFLYSKLTVDKSRWQQGNVFSCSVMHEALHNHYTQKSLSLSPG

SEQ ID NO: 1724 - protein, 216 aa, synthetic construct
  REGION 1..216: note = Description of Artificial Sequence: Syntheticpolypeptide
QSVLTQPPSASGTPGQRVTISCSGSSSNIGSSSVSWYQQLPGTAPKLLIYKNNQRPSGVPDRFSGSKSGTSASLAISGLRSEDEADYYCSTWDDSLSVRVFGGGTKLTVLGQPKAAPSVTLFPPSSEELQANKATLVCLVSDFYPGAVTVAWKADGSPVKVGVETTKPSKQSNNKYAASSYLSLTPEQWKSHRSYSCRVTHEGSTVEKTVAPAECS

SEQ ID NO: 1725 - protein, 140 aa, synthetic construct; identical to SEQ ID NO: 99
  REGION 1..140: note = Description of Artificial Sequence: Syntheticpolypeptide

SEQ ID NO: 1726 - protein, 110 aa, synthetic construct; identical to SEQ ID NO: 123
  REGION 1..110: note = Description of Artificial Sequence: Syntheticpolypeptide

SEQ ID NO: 1727 - protein, 31 aa, synthetic construct; identical to SEQ ID NO: 38
  REGION 1..31: note = Description of Artificial Sequence: Syntheticpolypeptide

SEQ ID NO: 1728 - protein, 10 aa, synthetic construct
  REGION 1..10: note = Description of Artificial Sequence: Syntheticpeptide
  VARIANT 3: note = X is T or V
  VARIANT 4: note = X is F or Y
  VARIANT 5: note = X is S or A
  VARIANT 6: note = X is K, A or M
  VARIANT 10: note = X is S or T
GFXXXXAWMX

SEQ ID NO: 1729 - protein, 19 aa, synthetic construct
  REGION 1..19: note = Description of Artificial Sequence: Syntheticpeptide
  VARIANT 4: note = X is S or A
  VARIANT 5: note = X is V, N, A or T
  VARIANT 6: note = X is T, Q, S, D or H
  VARIANT 7: note = X is D or E
  VARIANT 8: note = X is G or A
  VARIANT 9: note = X is E, H, K or G
  VARIANT 10: note = X is T, Q or I
  VARIANT 12: note = X is D or E
  VARIANT 16: note = X is P or S
RIKXXXXXXXTXYAAXVKG

SEQ ID NO: 1730 - protein, 31 aa, synthetic construct
  REGION 1..31: note = Description of Artificial Sequence: Syntheticpolypeptide
  VARIANT 1: note = X is I or T
  VARIANT 2: note = X is S or T
  VARIANT 7: note = X is H or R
  VARIANT 8: note = X is G or S
  VARIANT 9: note = X is A, G, K or N
  VARIANT 10: note = X is N, Q, R or S
  VARIANT 14: note = X is H, R or S
  VARIANT 15: note = X is D or E
  VARIANT 18: note = X is F or Y
  VARIANT 20: note = X is A, G or N
  VARIANT 21: note = X is G or N
  VARIANT 22: note = X is Q, S or Y
  VARIANT 23: note = X is D, F, N or Y
  VARIANT 24: note = X is A, K, N, P or S
  VARIANT 25: note = X is D, Q, R or S
  VARIANT 26: note = X is F or Y
  VARIANT 28: note = X is F or Y
  VARIANT 29: note = X is M or V
  VARIANT 30: note = X is D or N
  VARIANT 31: note = X is I, P or V
XXSFCCXXXXCPSXXTSXCXXXXXXXYXXXX

SEQ ID NO: 1731 - protein, 13 aa, synthetic construct
  REGION 1..13: note = Description of Artificial Sequence: Syntheticpeptide
  VARIANT 3: note = X is S or A
  VARIANT 4: note = X is S, P or K
  VARIANT 5: note = X is S or T
  VARIANT 6: note = X is N or D
  VARIANT 11: note = X is S, Y or T
  VARIANT 13: note = X is S, Y or T
SGXXXXIGSSXVX

SEQ ID NO: 1732-1739 - skipped (8 entries)

SEQ ID NO: 1740 - protein, 31 aa, synthetic construct
  REGION 1..31: note = Description of Artificial Sequence: Syntheticpolypeptide
TSSFCCRGGRCPSRDTSFCGGQYNSYYYMDV

SEQ ID NO: 1741 - protein, 13 aa, synthetic construct
  REGION 1..13: note = Description of Artificial Sequence: Syntheticpeptide
SGSSDNIGSSSVS

SEQ ID NO: 1742-1743 - skipped (2 entries)

SEQ ID NO: 1744 - protein, 31 aa, synthetic construct
  REGION 1..31: note = Description of Artificial Sequence: Syntheticpolypeptide
  VARIANT 1: note = X is I or T
  VARIANT 2: note = X is S or T
  VARIANT 3: note = X is A, P or S
  VARIANT 4: note = X is F or Y
  VARIANT 7: note = X is H, L, Q or R
  VARIANT 8: note = X is G or S
  VARIANT 9: note = X is A, G, K or N
  VARIANT 10: note = X is A, N, Q, R or S
  VARIANT 12: note = X is A, L or P
  VARIANT 13: note = X is N or S
  VARIANT 14: note = X is H, Q, R or S
  VARIANT 15: note = X is D or E
  VARIANT 18: note = X is F or Y
  VARIANT 20: note = X is A, G or N
  VARIANT 21: note = X is G or N
  VARIANT 22: note = X is Q, S or Y
  VARIANT 23: note = X is D, F, N or Y
  VARIANT 24: note = X is A, K, N, P or Q
  VARIANT 25: note = X is D, Q, R or S
  VARIANT 26: note = X is F or Y
  VARIANT 28: note = X is F, L, W or Y
  VARIANT 29: note = X is F, M or V
  VARIANT 30: note = X is D or N
  VARIANT 31: note = X is I, P or V
XXXXCCXXXXCXXXXTSXCXXXXXXXYXXXX

SEQ ID NO: 1745-1746 - skipped (2 entries)

SEQ ID NO: 1747 - protein, 31 aa, synthetic construct
  REGION 1..31: note = Description of Artificial Sequence: Syntheticpolypeptide
  VARIANT 2: note = X is S or T
  VARIANT 10: note = X is R or S
  VARIANT 14: note = X is H or R
  VARIANT 18: note = X is Y or F
  VARIANT 22: note = X is Q or S
  VARIANT 23: note = X is Y or D
  VARIANT 24: note = X is K, N or S
  VARIANT 25: note = X is R or S
TXSFCCRGGXCPSXDTSXCGGXXXXYYYMDV

SEQ ID NO: 1748 - protein, 12 aa, synthetic construct
  REGION 1..12: note = Description of Artificial Sequence: Syntheticpeptide
  VARIANT 5: note = X is D or E
STWDXDSLSVRV

SEQ ID NO: 1749 - protein, 10 aa, synthetic construct
  REGION 1..10: note = Description of Artificial Sequence: Syntheticpeptide
  VARIANT 10: note = X is S or T
GFTFSKAWMX

SEQ ID NO: 1750 - protein, 19 aa, synthetic construct
  REGION 1..19: note = Description of Artificial Sequence: Syntheticpeptide
  VARIANT 5: note = X is V or T
  VARIANT 6: note = X is T or S
  VARIANT 7: note = X is D or E
  VARIANT 9: note = X is E or G
  VARIANT 10: note = X is I or T
RIKSXXXGXXTDYAAPVKG

SEQ ID NO: 1751 - protein, 31 aa, synthetic construct
  REGION 1..31: note = Description of Artificial Sequence: Syntheticpolypeptide
  VARIANT 2: note = X is S or T
  VARIANT 10: note = X is R or S
  VARIANT 14: note = X is H or R
  VARIANT 18: note = X is Y or F
  VARIANT 22: note = X is Q or S
TXSFCCRGGXCPSXDTSXCGGXYKSYYYMDV

SEQ ID NO: 1752 - protein, 31 aa, synthetic construct
  REGION 1..31: note = Description of Artificial Sequence: Syntheticpolypeptide
  VARIANT 2: note = X is S or T
  VARIANT 10: note = X is R or S
  VARIANT 14: note = X is H or R
  VARIANT 18: note = X is Y or F
  VARIANT 22: note = X is Q or S
TXSFCCRGGXCPSXDTSXCGGXDSRYYYMDV

SEQ ID NO: 1753 - protein, 31 aa, synthetic construct
  REGION 1..31: note = Description of Artificial Sequence: Syntheticpolypeptide
  VARIANT 2: note = X is S or T
  VARIANT 10: note = X is R or S
  VARIANT 14: note = X is H or R
  VARIANT 18: note = X is Y or F
  VARIANT 22: note = X is Q or S
TXSFCCRGGXCPSXDTSXCGGXYNRYYYMDV

SEQ ID NO: 1754 - protein, 31 aa, synthetic construct
  REGION 1..31: note = Description of Artificial Sequence: Syntheticpolypeptide
  VARIANT 2: note = X is S or T
  VARIANT 10: note = X is R or S
  VARIANT 14: note = X is H or R
  VARIANT 18: note = X is Y or F
  VARIANT 22: note = X is Q or S
TXSFCCRGGXCPSXDTSXCGGXYNSYYYMDV

SEQ ID NO: 1755 - protein, 31 aa, synthetic construct
  REGION 1..31: note = Description of Artificial Sequence: Syntheticpolypeptide
  VARIANT 2: note = X is S or T
  VARIANT 10: note = X is R or S
  VARIANT 14: note = X is H or R
  VARIANT 18: note = X is Y or F
  VARIANT 22: note = X is Q or S
TXSFCCRGGXCPSXDTSXCGGXDKRYYYMDV

SEQ ID NO: 1756 - protein, 19 aa, synthetic construct
  REGION 1..19: note = Description of Artificial Sequence: Syntheticpeptide
  VARIANT 7: note = X is D or E
RIKSVTXGETTDYAAPVKG

SEQ ID NO: 1757 - protein, 31 aa, synthetic construct
  REGION 1..31: note = Description of Artificial Sequence: Syntheticpolypeptide
  VARIANT 2: note = X is S or T
  VARIANT 18: note = X is Y or F
  VARIANT 22: note = X is Q or S
  VARIANT 23: note = X is Y or D
  VARIANT 24: note = X is K, N or S
  VARIANT 25: note = X is R or S
TXSFCCRGGSCPSHDTSXCGGXXXXYYYMDV

SEQ ID NO: 1758 - protein, 31 aa, synthetic construct
  REGION 1..31: note = Description of Artificial Sequence: Syntheticpolypeptide
  VARIANT 2: note = X is S or T
  VARIANT 18: note = X is Y or F
  VARIANT 22: note = X is Q or S
TXSFCCRGGSCPSHDTSXCGGXYKSYYYMDV

SEQ ID NO: 1759 - protein, 31 aa, synthetic construct
  REGION 1..31: note = Description of Artificial Sequence: Syntheticpolypeptide
  VARIANT 2: note = X is S or T
  VARIANT 18: note = X is Y or F
  VARIANT 22: note = X is Q or S
TXSFCCRGGSCPSHDTSXCGGXDSRYYYMDV

SEQ ID NO: 1760 - protein, 31 aa, synthetic construct
  REGION 1..31: note = Description of Artificial Sequence: Syntheticpolypeptide
  VARIANT 2: note = X is S or T
  VARIANT 18: note = X is Y or F
  VARIANT 22: note = X is Q or S
TXSFCCRGGSCPSHDTSXCGGXYNRYYYMDV

SEQ ID NO: 1761 - protein, 31 aa, synthetic construct
  REGION 1..31: note = Description of Artificial Sequence: Syntheticpolypeptide
  VARIANT 2: note = X is S or T
  VARIANT 22: note = X is Q or S
  VARIANT 18: note = X is Y or F
TXSFCCRGGSCPSHDTSXCGGXDKRYYYMDV

SEQ ID NO: 1762 - protein, 11 aa, synthetic construct
  REGION 1..11: note = Description of Artificial Sequence: Syntheticpeptide
  VARIANT 5: note = X is D or E
STWDXSLSVRV

SEQ ID NO: 1763 - protein, 8 aa, synthetic construct
  REGION 1..8: note = Description of Artificial Sequence: Syntheticpeptide
GFTFSKAW

SEQ ID NO: 1764 - protein, 10 aa, synthetic construct
  REGION 1..10: note = Description of Artificial Sequence: Syntheticpeptide
IKSVTDGETT

SEQ ID NO: 1765 - protein, 8 aa, synthetic construct
  REGION 1..8: note = Description of Artificial Sequence: Syntheticpeptide
SSNIGSSS

SEQ ID NO: 1766 - protein, 5 aa, synthetic construct
  REGION 1..5: note = Description of Artificial Sequence: Syntheticpeptide
KAWMS

SEQ ID NO: 1767 - protein, 29 aa, synthetic construct
  REGION 1..29: note = Description of Artificial Sequence: Syntheticpeptide
SFCCRGGSCPSHDTSYCGGQYKSYYYMDV

SEQ ID NO: 1768 - protein, 7 aa, synthetic construct
  REGION 1..7: note = Description of Artificial Sequence: Syntheticpeptide
GFTFSKA

SEQ ID NO: 1769 - protein, 8 aa, synthetic construct
  REGION 1..8: note = Description of Artificial Sequence: Syntheticpeptide
KSVTDGET

SEQ ID NO: 1770 - protein, 19 aa, synthetic construct
  REGION 1..19: note = Description of Artificial Sequence: Syntheticpeptide
  VARIANT 5: note = X is V or T
  VARIANT 6: note = X is T or S
  VARIANT 7: note = X is D or E
  VARIANT 9: note = X is E or G
  VARIANT 10: note = X is I or T
  VARIANT 12: note = X is D or E
RIKSXXXGXXTXYAAPVKG

SEQ ID NO: 1771 - protein, 7 aa, synthetic construct
  REGION 1..7: note = Description of Artificial Sequence: Syntheticpeptide
  VARIANT 1: note = X is K or R
  VARIANT 2: note = X is N or D
  VARIANT 3: note = X is N or D
XXXQRPS

SEQ ID NO: 1772 - protein, 11 aa, synthetic construct
  REGION 1..11: note = Description of Artificial Sequence: Syntheticpeptide
  VARIANT 5: note = X is D or E
  VARIANT 10: note = X is R or W
STWDXSLSVXV
